(19) United States
(12) Patent Application Publication
(10) Pub. No.: US 2024/0409930 A1
(43) Pub. Date: Dec. 12, 2024

(54) MUC5B-TARGETED ANTISENSE OLIGONUCLEOTIDES AND RELATED METHODS FOR MODULATING MUCIN EXPRESSION

(71) Applicant: SpliSense Ltd., Jerusalem (IL)

(72) Inventors: Gili HART, Shoham (IL); Efrat OZERI-GALAI, Jerusalem (IL); Yifat OREN, Jerusalem (IL); Ofra BARCHAD-AVITZUR, Jerusalem (IL); Chava STAMPFER, Efrat (IL)

(73) Assignee: SpliSense Ltd., Jerusalem (IL)

(21) Appl. No.: 18/669,584

(22) Filed: May 21, 2024

Related U.S. Application Data
(63) Continuation of application No. 18/709,502, filed on Jan. 1, 0001.
(60) Provisional application No. 63/304,622, filed on Jan. 30, 2022.
(60) Provisional application No. 63/287,554, filed on Dec. 9, 2021.

(51) Int. Cl. C12N 15/113; A61K 45/06; A61P 11/00

(52) U.S. Cl. CPC C12N 15/113; A61K 45/06; A61P 11/00; C12N 2310/11

(57) ABSTRACT

The present invention provides specific synthetic oligonucleotides, as well as vectors, cells, and pharmaceutical compositions comprising the oligonucleotides, and their use in methods of treating, suppressing, inhibiting, ameliorating, or slowing progression of a lung disease or disorder, such as chronic obstructive pulmonary disease (COPD), asthma, idiopathic pulmonary fibrosis (IPF), and non-cystic fibrosis bronchiectasis (NCFB).

### CROSS-REFERENCE TO RELATED APPLICATIONS

[0001] This application is a Continuation of U.S. patent application Ser. No. 18/709,502 filed May 12, 2024, which is a National Phase filing of PCT International Application No. PCT/IL2022/051303, International Filing Date Dec. 8, 2022, claiming the benefit of U.S. Patent Application Nos. 63/304,622, filed Jan. 30, 2022, and 63/287,554, filed Dec. 9, 2021, which are hereby incorporated by reference in their entirety.

### SEQUENCE LISTING STATEMENT

[0002] A Sequence Listing conforming to the rules of WIPO Standard ST.26 is hereby incorporated by reference. The Sequence Listing has been filed as an electronic document via EFS-Web in ASCII format encoded as XML. The electronic document, created on Dec. 7, 2022, is entitled “P-610294-PC_ST26.xml”, and is 3,869,470 bytes in size.

### FIELD OF THE DISCLOSURE

[0003] The present invention provides specific synthetic oligonucleotides, as well as vectors, cells, and pharmaceutical compositions comprising the oligonucleotides, and their use in methods of treating, suppressing, inhibiting, ameliorating, or slowing progression of a lung disease or disorder, such as chronic obstructive pulmonary disease (COPD), asthma, idiopathic pulmonary fibrosis (IPF), and non-cystic fibrosis bronchiectasis (NCFB).

### BACKGROUND

[0004] Mucus is a thin extracellular hydrogel film consisting of water, ions, proteins, and macromolecules covering airway surfaces that is involved in the protection, lubrication, and transport through airways. Under healthy conditions, mucus maintains hydration in the airways and protects against inhaled pathogens, toxic gases, and airborne pollutants. Mucus also helps the innate immune response by transporting a variety of antioxidants, antiproteases, antimicrobial substances, immune-modulatory molecules, and protective molecules. However, excessive mucus contributes to transient respiratory infections and to the pathogenesis of numerous respiratory diseases.

[0005] The major macromolecular components of mucus are the mucin glycoproteins, which are critical for local defense of the airway. Healthy airway mucus is comprised mainly of water (>95%). The primary solid components of the mucus layer are the mucins, which are produced by epithelial cells and mucin-secreting goblet cells and give mucus its viscoelastic properties. Mucins are high molecular-weight glycoproteins (˜3 MDa), 50-90% carbohydrate by mass and with dozens to several hundreds of O-glycosylation sites per molecule.

[0006] Increased mucin production occurs in many adenocarcinomas, including cancers of the pancreas, lung, breast, ovary, colon and other tissues. Mucins are also overexpressed in lung diseases such as asthma, bronchitis, chronic obstructive pulmonary disease (COPD), idiopathic pulmonary fibrosis, and cystic fibrosis.

[0007] Muco-obstructive airway diseases are characterized by mucin-producing cell hyperplasia, mucin hypersecretion, and an altered mucin macromolecular form, which contribute to the formation of a dysfunctional mucus gel. Mucus accumulated in the airways cause obstruction which results in infection and inflammation.

[0008] Also, mucus with aberrant properties compromises airway clearance. The mucus may be characterized by defective mucin intracellular assembly and intragranular packaging, defective post-secretory mucin expansion as a result of a non-optimal local environment (hydration, pH and HCO₃), formation of permanent cross-links between mucin chains, alterations in the relative amounts of MUC5AC and MUC5B, and/or alterations in the different glycosylated variants of MUC5B.

[0009] Antisense oligonucleotides (ASOs) are small synthetic nucleic acid molecules able to bind specific sequences within target RNA molecules. ASOs are used for gene silencing by RNA cleavage and RNA editing. ASOs may also be used to modulate the splicing of a target gene by enhancing retention or skipping of a specific exon. Chemical modifications of ASOs allow ASOs to align with the target sequence, such as a consensus motif, without inducing cleavage of the target RNA. ASOs are highly specific and allow manipulation of specific exons without influencing the splicing of other genes.

[0010] Using ASOs to specifically target splicing sites in mucin mRNA rather than for gene silencing is a novel way for controlling expression or overexpression of mucin mRNA and provides a much-needed alternative treatment for muco-obstructive disorders and cancer.

### SUMMARY OF THE DISCLOSURE

[0011] In one embodiment, the present invention provides a synthetic antisense oligonucleotide targeting MUC5AC, MUC5B, or both MUC5AC and MUC5B and/or surrounding intronic sequences, wherein said oligonucleotide is fully chemically modified.

[0012] In another embodiment, the present invention provides a vector comprising a synthetic antisense oligonucleotide targeting MUC5AC, MUC5B, or both MUC5AC and MUC5B and/or surrounding intronic sequences, wherein said oligonucleotide is fully chemically modified.

[0013] In another embodiment, the present invention provides a pharmaceutical composition comprising a synthetic antisense oligonucleotide targeting MUC5AC, MUC5B, or both MUC5AC and MUC5B and/or surrounding intronic sequences, wherein said oligonucleotide is fully chemically modified.

[0014] In another embodiment, the present invention provides a method for treating a lung disease or disorder in a subject, comprising the step of administering to said subject a synthetic antisense oligonucleotide targeting MUC5AC, MUC5B, or both MUC5AC and MUC5B and/or surrounding intronic sequences, wherein said oligonucleotide is fully chemically modified, or a vector, cell, or pharmaceutical composition comprising the antisense oligonucleotide.

[0015] In another embodiment, the present invention provides a method for suppressing or inhibiting a lung disease or disorder in a subject, comprising the step of administering to said subject a synthetic antisense oligonucleotide targeting MUC5AC, MUC5B, or both MUC5AC and MUC5B and/or surrounding intronic sequences, wherein said oligonucleotide is fully chemically modified, or a vector, cell, or pharmaceutical composition comprising the antisense oligonucleotide.

[0016] In another embodiment, the present invention provides a method for reducing the levels of MUC5AC, MUC5B, or both MUC5AC and MUC5B in a cell of a subject comprising the step of administering to said subject a synthetic antisense oligonucleotide targeting MUC5AC, MUC5B, or both MUC5AC and MUC5B and/or surrounding intronic sequences, wherein said oligonucleotide is fully chemically modified, or a vector, cell, or pharmaceutical composition comprising the antisense oligonucleotide.

[0017] In another embodiment, the present invention provides a method of inducing nonsense-mediated decay of MUC5AC, MUC5B, or both MUC5AC and MUC5B in a cell of a subject, comprising the step of administering to the subject a composition comprising a synthetic antisense oligonucleotide targeting MUC5AC, MUC5B, or both MUC5AC and MUC5B and/or surrounding intronic sequences.

### BRIEF DESCRIPTION OF THE DRAWINGS

[0018] FIGS. 1A-1C. A map of the MUC5AC ASOs tested. The tested human ASOs are mapped to their positions relative to exon 5 (FIG. 1A), exon 16 (FIG. 1B) or exon 26 (FIG. 1C) and flanking intronic sequences (thin gray bar). Boxes surround ASOs located in areas that are 100% homologous to the mouse Muc5ac gene. ASOs having the strongest effect on lowering MUC5AC RNA levels have a white background.

[0019] FIGS. 2A-2C. The effect of MUC5AC ASOs on the level of MUC5AC transcript. A549 cells were transfected with 10 nM of each ASO, RNA was extracted, and the levels of MUC5AC transcripts were analyzed by RT-PCR 24 hours after transfection. FIG. 2A. An example of RT-PCR of ASOs screened for exon 5. FIG. 2B. An example of RT-PCR of ASOs screened for exon 16. FIG. 2C. An example of RT-PCR of ASOs screened for exon 26. Boxed lanes indicate the ASOs that are most efficient in reducing full length MUC5AC RNA.

[0020] FIG. 3. MUC5AC full length transcript levels following ASO transfection. Following a 24-hour treatment of A549 cells with 10 nM of the indicated ASO, RNA was extracted and the level of MUC5AC full-length transcript was measured by RT-qPCR 24 hours after transfection. The values shown are the average fold change (mean±SEM) from 3-4 independent experiments relative to cells treated with a control ASO. Values were normalized against transcripts of GAPDH gene. Bars representing ASOs that reduced the level of full length MUC5AC transcripts to 60% of control levels or less are striped, as well as SPL5AC3, which showed an effect in RT-PCR. Bars representing ASOs that are less efficient are gray. Statistical analysis was performed using Student's t test (1 tail, paired). *p<0.05, **p<0.01.

[0021] FIG. 4. Off-target effect of selected MUC5AC-targeted ASOs on the MUC5B full length transcripts. MUC5B full length transcripts levels in A549 cells following ASO transfection (10 nM). Following a 24-hour treatment with the indicated ASO, RNA was extracted and the levels of MUC5B full-length transcripts were measured by RT-qPCR. The values shown are the average fold change (mean±SEM) from 3-4 independent experiments relative to cells treated with a control ASO. Values were normalized against transcripts of GAPDH gene. Statistical analysis was performed using Student's t-test (1 tail, paired). *p<0.05, **p<0.01.

[0022] FIG. 5. A map of ASOs targeting Exon 5 of MUC5AC. The ASOs are mapped to their position relative to exon 5.

[0023] FIGS. 6A-6B. The effect of the MUC5AC Exon 5 ASOs on MUC5AC transcript levels detected by RT-PCR. A549 cells were transfected with 10 nM of each ASO, RNA was extracted, and the levels of MUC5AC transcripts were analyzed 24 hours after transfection. FIG. 6A. An example of RT-PCR of ASOs SPL5AC5-1 through SPL5AC5-15. FIG. 6B. An example of RT-PCR of ASOs SPL5AC5-16 through SPL5AC5-30. Boxed lanes indicate the ASOs that are most efficient in reducing full length MUC5AC RNA

[0024] FIGS. 7A-7B. The effect of the MUC5AC Exon 5-directed SPLAC4 ASO on the MUC5AC transcripts level in human nasal epithelial (HNE) cells. HNEs were differentiated in air-liquid conditions for 35 days. Cells were treated with 20 μM SPL5AC4 every other day for the last two weeks of differentiation prior to RNA harvest, for a total of 7 additions. Some cells were treated with ing/ml IL-13, which stimulates mucus production and induces MUC5AC expression in human airway epithelial cells, two days prior to adding the ASO and every time the ASO was added (8 additions in total). On day 35 of differentiation, RNA was extracted and the levels of MUC5AC full-length transcripts were measured by RT-PCR (FIG. 7A) and RT-qPCR (FIG. 7B). The values shown are the average fold change (mean±SEM) from 3-4 filters relative to cells treated with UPW+0.1% BSA (control). Values were normalized against transcripts of GUSb gene.

[0025] FIG. 8. The effect of MUC5AC Exon 5-directed SPLAC4 ASO and SPLAC8 ASO on the level of MUC5AC transcripts in human bronchial epithelial (HBE) cells. HBEs were differentiated in air-liquid conditions for 35 days. Cells were treated with 20 μM SPL5AC4 or SPL5AC8 for the last two weeks of differentiation every other day prior to RNA harvest, for a total of 7 additions. Some cells were treated with 10 ng/ml IL-13, which stimulates mucus production and induces MUC5AC expression in human airway epithelial cells, two days prior to adding the ASO and every time the ASO was added (8 additions in total). On day 35 of differentiation, RNA was extracted and the levels of MUC5AC full-length transcripts were measured by RT-PCR.

[0026] FIG. 9. No off-target effect of SPLAC4 on the splicing pattern of the MUC5B gene in HBE cells. HBEs were differentiated in air-liquid conditions for 35 days. Cells were treated with 20 μM SPL5AC4 or SPL5AC8 every other day for the last two weeks of differentiation prior to RNA harvest, for a total of 7 additions. Some cells were treated with 1 ng/ml IL-13, which stimulates mucus production and induces MUC5AC expression in human airway epithelial cells, two days prior to adding the ASO and every time the ASO was added (8 additions in total). On day 35 of differentiation, RNA was extracted and the levels of MUC5B full-length transcripts were measured by RT-PCR.

[0027] FIGS. 10A-10C: A map of the MUC5B ASOs tested and their origin ASOs. The tested human ASOs are mapped to their positions relative to exon 22 (FIG. 10A), exon 26 (FIG. 10B) or exon 28 (FIG. 10C) and flanking intronic sequences (thin gray bar). Boxes surround ASOs located in areas that are 100% homologous to the mouse Muc5b gene. ASOs having the strongest effect on lowering MUC5AC RNA levels have a white background.

[0028] FIGS. 11A-11C. The effect of MUC5B ASOs on the level of MUC5B transcript. A549 cells were transfected with 10 nM of each ASO, RNA was extracted, and the levels of MUC5B transcripts were analyzed by RT-PCR 24 hours after transfection. FIG. 11A. An example of RT-PCR of ASOs screened for exon 22. FIG. 11B. An example of RT-PCR of ASOs screened for exon 26. FIG. 11C. An example of RT-PCR of ASOs screened for exon 28.

[0029] FIG. 12. MUC5B full length transcript levels in A549 cells following ASO transfection. Following a 24-hour treatment with 10 nM of the indicated ASO, RNA was extracted, and the levels of MUC5B full-length transcripts were measured by RT-qPCR 24 hours after transfection. The values shown are the average fold change (mean±SEM) from 3-4 independent experiments relative to cells treated with a control ASO. Values were normalized against transcripts of GAPDH gene. Bars representing ASOs that reduced the level of full length MUC5B transcripts to 65% of control levels or less are striped, while bars representing ASOs that are less efficient are gray. Statistical analysis was performed using Student's t test (1 tail, paired). *p<0.05, **p<0.01.

[0030] FIG. 13. Off-target effect of the selected MUC5B-targeted ASOs on the MUC5AC full length transcripts. MUC5AC full length transcripts levels in A549 cells following ASO transfection (10 nM). Following a 24-hour treatment with the indicated ASO, RNA was extracted and the levels of MUC5AC full-length transcripts were measured by RT-qPCR. The values shown are the average fold change (mean±SEM) from 3-4 independent experiments relative to cells treated with a control ASO. Values were normalized against transcripts of GAPDH gene. Statistical analysis was performed using Student's t test (1 tail, paired).

[0031] FIG. 14. A map of ASOs tested that target Exon 5 of MUC5B. The ASOs are mapped to their position relative to exon 5.

[0032] FIGS. 15A-15B. The effect of the MUC5B Exon 5 ASOs on MUC5B transcript levels detected by RT-PCR. A549 cells were transfected with 10 nM of each ASO, RNA was extracted, and the levels of MUC5B transcripts were analyzed 24 hours after transfection. FIG. 15A. An example of RT-PCR of ASOs SPL5B5-10, SPL5B5-13, SPL5B5-15, SPL5B5-19, and SPL5B5-21 through SPL5B5-25. FIG. 15B. An example of RT-PCR of ASOs SPL5B5-1-SPL5B5-9, SPL5B5-11, SPL5B5-12, SPL5B5-14, and SPL5B5-16 through SPL5B5-19. Boxed lanes indicate the ASOs that are most efficient in reducing full length MUC5B RNA

[0033] FIG. 16. MUC5B full length transcript levels following transfection with Exon 5-targeting ASOs. Following a 24-hour treatment of A549 cells with 10 nM of the indicated ASO, RNA was extracted and the level of full length MUC5B transcripts was measured by RT-qPCR 24 hours after transfection. The values shown are the average fold change (mean±SEM) from 3-4 independent experiments relative to cells treated with a control ASO. Values were normalized against transcripts of GAPDH gene. Bars representing ASOs that reduced the level of full length MUC5B transcripts to 65% of control levels or less are striped, while bars representing ASOs that are less efficient are black. Statistical analysis was performed using Student's t-test (1 tail, paired). *p<0.05, **p<0.01, ***p<0.001.

[0034] FIG. 17. The effect of MUC5B Exon 5-directed SPL5B2 ASO on the level of MUC5B transcripts in human bronchial epithelial (HBE) cells. HBEs were differentiated in air-liquid conditions for 35 days. Cells were treated with 20 μM SPL5B2 every other day for the last two weeks of differentiation prior to RNA harvest for a total of 7 additions. On day 35 from differentiation, RNA was extracted and the levels of MUC5B full-length transcripts were measured by RT-PCR.

[0035] FIGS. 18A-18D. Baseline Muc5ac and Muc5b RNA expression levels in mice. RNA was extracted from the lungs of 4 Balb/c mice, and the levels of Muc5ac and Muc5b transcripts were detected by RT-PCR (FIG. 18A and FIG. 18C) and RT-qPCR (FIG. 18B and FIG. 18D). The values shown are the fold change relative to the average of the values for WT mice. Values were normalized against transcripts of IPO8 gene.

[0036] FIG. 19. SPL5AC4 reduces Muc5ac levels in Balb/c mice. Balb/c mice were administered SPL5AC4 intrathecally (IT) 4 times over two weeks at a dose of 10 mg/kg/dose. RNA was extracted from the lungs, and the levels of Muc5ac transcripts were detected by RT-PCR.

### DETAILED DESCRIPTION

[0037] In the following detailed description, numerous specific details are set forth in order to provide a thorough understanding of the invention. However, it will be understood by those skilled in the art that the present invention may be practiced without these specific details. In other instances, well-known methods, procedures, and components have not been described in detail so as not to obscure the present invention.

[0038] The present invention provides compositions and methods for treating a lung disease or disorder in a subject by administering antisense oligonucleotides that alter the splicing of MUC5AC, MUC5B, or both MUC5AC and MUC5B gene transcripts. In some embodiments, administration of the antisense oligonucleotides as described herein reduces MUC5AC, MUC5B, or both MUC5AC and MUC5B mRNA levels. In some embodiments, administration of the antisense oligonucleotides as described herein reduces MUC5AC, MUC5B, or both MUC5AC and MUC5B protein expression. In some embodiments, administration of the antisense oligonucleotides as described herein introduces a premature termination codon (PTC) in the MUC5AC, MUC5B, or both MUC5AC and MUC5B gene transcripts. In some embodiments, the truncated MUC5AC, MUC5B, or both MUC5AC and MUC5B gene transcripts are degraded by the Nonsense-Mediated Decay (NMD) mechanism. In some embodiments, administration of the antisense oligonucleotides as described herein increases mucin-specific mRNA degradation. In other embodiments, administration of the antisense oligonucleotides as described herein decreases expression levels, cellular localization or function of MUC5AC, MUC5B, or both MUC5AC and MUC5B, or a combination thereof. In some embodiments, the compositions and methods as described herein inhibit expression of MUC5AC, MUC5B, or both MUC5AC and MUC5B mRNA and/or protein, but do not eliminate expression of MUC5AC, MUC5B, or both MUC5AC and MUC5B mRNA and/or protein. In some embodiments, altered expression or activity of MUC5AC, MUC5B, or both MUC5AC and MUC5B is in airway cells. In other embodiments, expression of activity is in mucus secreting airway cells.

### Antisense Oligonucleotides

[0039] In some embodiments, “antisense oligonucleotide” or “ASO” as used herein describes a single-stranded oligonucleotide having a nucleobase sequence that permits hybridization to a corresponding segment of a target nucleic acid.

[0040] In some embodiments, the present invention provides an oligonucleotide, which is a splicing modulator. In some embodiments, the present invention provides vectors, cells, compositions, methods, and kits as described herein comprise a splicing modulator. In some embodiments, the present invention provides administration of a splicing modulator, which, in some embodiments, is an antisense oligonucleotide.

[0041] In some embodiments, the present invention provides an antisense oligonucleotide that targets a MUC pre-mRNA. In some embodiments, the MUC pre-mRNA comprises MUC2, MUC19, MUC1, MUC4, MUC7, MUC11, MUC15, MUC16, MUC20, or a combination thereof. In other embodiments, the MUC pre-mRNA comprises MUC5 pre-mRNA. In some embodiments, the MUC5 pre-mRNA comprises MUC5AC. In other embodiments, the MUC5 pre-mRNA comprises MUC5B. In some embodiments, the ASO targets a mucin that is secreted, which in one embodiment, comprises MUC7, MUC5AC, MUC5B. In some embodiments, the ASO targets a mucin that is cell surface associated, which in one embodiment, comprises MUC1, MUC4, MUC16, MUC20. In some embodiments, the ASO targets a mucin that polymerizes to form gels, while in other embodiments, the ASO targets a mucin that does not polymerize, which in one embodiment is MUC7.

[0042] In some embodiments, the present invention provides an oligonucleotide having 8 to 30 linked nucleosides having a nucleobase sequence comprising a complementary region, wherein the complementary region comprises at least 8 contiguous nucleobases complementary to an equal-length portion of a target region of a MUC5AC, MUC5B, or both MUC5AC and MUC5B transcript. In other embodiments, the antisense oligonucleotide has a nucleobase sequence comprising at least 12, at least 13, at least 14, at least 15, at least 16, at least 17, at least 18, or at least 19 contiguous nucleobases.

[0043] In some embodiments, targeting includes determination of at least one target segment to which an oligonucleotide hybridizes, such that a desired effect occurs. A target region may contain one or more target segments. Multiple target segments within a target region may be overlapping. Alternatively, they may be non-overlapping. In some embodiments, target segments within a target region are separated by no more than about 300 nucleotides. In some embodiments, target segments within a target region are separated by a number of nucleotides that is no more 25 than 250, 200, 150, 100, 90, 80, 70, 60, 50, 40, 30, 20, or 10 nucleotides on the target nucleic acid, or is a range defined by any two of the preceding values. In some embodiments, target segments within a target region are separated by no more than five nucleotides on the target nucleic acid. In some embodiments, target segments are contiguous.

[0044] In some embodiments, a target region is a structurally defined region of the target nucleic acid. In some embodiments, a suitable target segment may be found within a 5′ UTR, a coding region, a 3′ UTR, an intron, an exon, or an exon/intron junction. In one embodiment, the target segment is in an exon/intron junction. In some embodiments, the target segment is within an exon of MUC5AC or MUC5B. In some embodiments, the target segment is an exonic splicing silencer. In other embodiments, the target segment is an exonic splicing enhancer. In other embodiments, the target region comprises a translation initiation region, translation termination region, or other defined nucleic acid region. The structurally defined regions for MUC5A or MUC5B can be obtained by accession number from sequence databases such as NCBI and such information is incorporated herein by reference.

[0045] In some embodiments, the antisense oligonucleotide is complementary to and/or targeted to MUC5AC (for example, NCBI accession numbers: NM_001304359.2, AF015521.1, AF043909.1, AJ001402.1, AJ292079.1, AJ298317.1, AL833060.1, BC033831.1, L46721.1, U06711.1, X81649.1, Z34277.1, Z34278.1, Z34279.1, Z34280.1, Z34281.1, Z34282.1, Z34283.1, Z48314.1). In other embodiments, the antisense oligonucleotide is complementary to and/or targeted to MUC5B (for example, NCBI accession numbers: NM_002458.3, AA577624.1, AF086604.1, AF253321.1, AK303892.1, AK310939.1, BM740816.1, BM796192.1, BM817984.1, CA450235.1, DC418119.1, S80993.1, U63836.1, U78550.1, U78551.1, U95031.1, X74370.1, X74954.1, X74955.1, X74956.1). In other embodiments, the antisense oligonucleotide is complementary to and/or targeted to a portion of MUC5AC or to a portion of MUC5B. In other embodiments, the antisense oligonucleotide is complementary to and/or targeted to both MUC5AC and MUC5B pre-mRNA.

[0046] In some embodiments, the nucleobases of the antisense oligonucleotide as described herein are complementary to a portion of SEQ ID NO: 2306. In another embodiment, the nucleobases of the antisense oligonucleotide as described herein are complementary to a portion of SEQ ID NO: 2307.

[0047] In some embodiments, the nucleobases of the antisense oligonucleotide are complementary to one or more portions of exons 1-31 of MUC5AC, MUC5B, or both MUC5AC and MUC5B. In other embodiments, the nucleobases of the antisense oligonucleotide are complementary to one or more portions of exons 4-29 of MUC5AC, MUC5B, or both MUC5AC and MUC5B. In other embodiments, the nucleobases of the antisense oligonucleotide are complementary to one or more portions of exons 4-8 of MUC5AC, MUC5B, or both MUC5AC and MUC5B. In other embodiments, the nucleobases of the antisense oligonucleotide are complementary to one or more portions of exons 10-11 of MUC5AC, MUC5B, or both MUC5AC and MUC5B. In other embodiments, the nucleobases of the antisense oligonucleotide are complementary to one or more portions of exon 13 of MUC5AC, MUC5B, or both MUC5AC and MUC5B. In other embodiments, the nucleobases of the antisense oligonucleotide are complementary to one or more portions of exons 16-22 of MUC5AC, MUC5B, or both MUC5AC and MUC5B. In other embodiments, the nucleobases of the antisense oligonucleotide are complementary to one or more portions of exon 26 of MUC5AC, MUC5B, or both MUC5AC and MUC5B. In other embodiments, the nucleobases of the antisense oligonucleotide are complementary to one or more portions of exons 28-29 of MUC5AC, MUC5B, or both MUC5AC and MUC5B. In other embodiments, the nucleobases of the antisense oligonucleotide are complementary to one or more portions of exon 31 of MUC5AC, MUC5B, or both MUC5AC and MUC5B.

[0048] In other embodiments, the nucleobases of the antisense oligonucleotide are complementary to one or more portions of Exons 4-8, 10-11, 13, 16-22, 26, 28-29, or 31 of MUC5AC, MUC5B, or both MUC5AC and MUC5B. In other embodiments, the ASO targets exons 4-8, 10-11, 13, 16-22, 26, 28-29, or 31 of MUC5AC, MUC5B, or both MUC5AC and MUC5B and/or introns adjacent to said exons. In other embodiments, the ASO targets exon 5, exon 16, or exon 26 of MUC5AC. In other embodiments, the ASO targets a portion of exon 5, exon 16, or exon 26 of MUC5AC. In other embodiments, the ASO targets exon 5, exon 22, exon 26, or exon 28 of MUC5B. In other embodiments, the ASO targets a portion of exon 5, exon 22, exon 26, or exon 28 of MUC5B.

[0049] In some embodiments, the nucleobases of the antisense oligonucleotide as described herein are complementary to a portion of any one or more of SEQ ID NOs: 215-232 or 272 or SEQ ID NOs: 2290-2297 or SEQ ID NOs: 251-260 or 271. In another embodiment, the nucleobases of the antisense oligonucleotide as described herein are complementary to a portion of any one or more of 233-250 or 274 or SEQ ID NOs: 2298-2305 or SEQ ID NOs: 261-270 or 273.

[0050] In some embodiments, the antisense oligonucleotide as described herein comprises SEQ ID NOs: 1-25 or 53-82. In other embodiments, the antisense oligonucleotide as described herein comprises SEQ ID NOs: 3, 4, 7, 8, 13 or 19. In other embodiments, the antisense oligonucleotide as described herein comprises SEQ ID NOs: 54, 55, 56, 58, 59, or 80.

[0051] In some embodiments, the antisense oligonucleotide as described herein comprises SEQ ID NOs: 29-52 or 83-107. In other embodiments, the antisense oligonucleotide as described herein comprises SEQ ID NOs: 32 or 30 or 35. In other embodiments, the antisense oligonucleotide as described herein comprises SEQ ID NOs: 88, 91, 94, 95, 101, 104, 105, or 107.

[0052] In some embodiments, the antisense oligonucleotide as described herein comprises 14-22 nucleotides. In other embodiments, the antisense oligonucleotide as described herein comprises 14-25 nucleotides. In other embodiments, the antisense oligonucleotide as described herein comprises 15-25 nucleotides. In other embodiments, the antisense oligonucleotide as described herein comprises 16-24 nucleotides. In other embodiments, the antisense oligonucleotide as described herein comprises 17-22 nucleotides. In other embodiments, the antisense oligonucleotide as described herein comprises 17-21 nucleotides. In other embodiments, the antisense oligonucleotide as described herein comprises 18-21 nucleotides. In other embodiments, the antisense oligonucleotide as described herein comprises 15 nucleotides. In other embodiments, the antisense oligonucleotide as described herein comprises 16 nucleotides. In other embodiments, the antisense oligonucleotide as described herein comprises 17 nucleotides. In other embodiments, the antisense oligonucleotide as described herein comprises 18 nucleotides. In other embodiments, the antisense oligonucleotide as described herein comprises 19 nucleotides. In other embodiments, the antisense oligonucleotide as described herein comprises 20 nucleotides. In other embodiments, the antisense oligonucleotide as described herein comprises 21 nucleotides. In other embodiments, the antisense oligonucleotide as described herein comprises 22 nucleotides. In other embodiments, the antisense oligonucleotide as described herein comprises 23 nucleotides. In other embodiments, the antisense oligonucleotide as described herein comprises 24 nucleotides. In other embodiments, the antisense oligonucleotide as described herein comprises 25 nucleotides.

[0053] In other embodiments, the antisense oligonucleotide as described herein comprises any one of SEQ ID NOs: 1-107. In other embodiments, the antisense oligonucleotide as described herein has 14-22 nucleotides and comprises any one of SEQ ID NOs: 1-107.

[0054] In other embodiments, the antisense oligonucleotide as described herein comprises any one of SEQ ID NOs: 275-2290. In other embodiments, the antisense oligonucleotide as described herein has 14-22 nucleotides and comprises any one of SEQ ID NOs: 275-2290.

[0055] In other embodiments, the antisense oligonucleotide as described herein has 14-22 nucleotides and targets exons 4-8, 10-11, 13, 16-22, 26, 28-29, or 31 of MUCSAC, MUCSB, or both MUCSAC and MUCSB and/or surrounding intronic sequences.

[0056] In some embodiments, targeting of an exon as described herein comprises targeting (a) one or more sequences in the exon; (b) one or more portions of an intron adjacent to the exon; or (c) the intron-exon junction of the exon.

[0057] In some embodiments, the intron that is adjacent to the exon is 5-60 nucleotides upstream or downstream of the exon. In other embodiments, the intron that is adjacent to the exon is 25-35 nucleotides upstream or downstream of the exon. In other embodiments, the intron that is adjacent to the exon is 1-100 nucleotides upstream or downstream of the exon. In other embodiments, the intron that is adjacent to the exon is 25-75 nucleotides upstream or downstream of the exon. In other embodiments, the intron that is adjacent to the exon is 10-50 nucleotides upstream or downstream of the exon. In other embodiments, the intron that is adjacent to the exon is 10-30 nucleotides upstream or downstream of the exon. In other embodiments, the intron that is adjacent to the exon is 5-20 nucleotides upstream or downstream of the exon. In other embodiments, the intron that is adjacent to the exon is 1-50 nucleotides upstream or downstream of the exon. In other embodiments, the intron that is adjacent to the exon is 20-40 nucleotides upstream or downstream of the exon. In other embodiments, the intron that is adjacent to the exon is 15-45 nucleotides upstream or downstream of the exon.

[0058] In another embodiment, the antisense oligonucleotide as described herein is complementary to a portion of Exon 4 of MUC5AC. In one embodiment, the antisense oligonucleotide is complementary to a portion of SEQ ID NO: 2290. In one embodiment, the antisense oligonucleotide is complementary to Exon 4 or the surrounding nucleotides. In one embodiment, the antisense oligonucleotide is complementary to a portion of SEQ ID NO: 215.

[0059] In another embodiment, the antisense oligonucleotide as described herein is complementary to a portion of Exon 5 of MUC5AC. In one embodiment, the antisense oligonucleotide is complementary to a portion of SEQ ID NO: 2291. In one embodiment, the antisense oligonucleotide is complementary to Exon 5 or the surrounding nucleotides. In one embodiment, the antisense oligonucleotide is complementary to a portion of SEQ ID NO: 216.

[0060] In another embodiment, the antisense oligonucleotide as described herein is complementary to a portion of Exon 6 of MUC5AC. In one embodiment, the antisense oligonucleotide is complementary to a portion of SEQ ID NO: 2292. In one embodiment, the antisense oligonucleotide is complementary to Exon 6 or the surrounding nucleotides. In one embodiment, the antisense oligonucleotide is complementary to a portion of SEQ ID NO: 217.

[0061] In another embodiment, the antisense oligonucleotide as described herein is complementary to a portion of Exon 7 of MUC5AC. In one embodiment, the antisense oligonucleotide is complementary to a portion of SEQ ID NO: 2293. In one embodiment, the antisense oligonucleotide is complementary to Exon 7 or the surrounding nucleotides. In one embodiment, the antisense oligonucleotide is complementary to a portion of SEQ ID NO: 218.

[0062] In another embodiment, the antisense oligonucleotide as described herein is complementary to a portion of Exon 8 of MUC5AC. In one embodiment, the antisense oligonucleotide is complementary to a portion of SEQ ID NO: 2294. In one embodiment, the antisense oligonucleotide is complementary to Exon 8 or the surrounding nucleotides. In one embodiment, the antisense oligonucleotide is complementary to a portion of SEQ ID NO: 219.

[0063] In another embodiment, the antisense oligonucleotide as described herein is complementary to a portion of Exon 10 of MUC5AC. In one embodiment, the antisense oligonucleotide is complementary to a portion of SEQ ID NO: 2295. In one embodiment, the antisense oligonucleotide is complementary to Exon 10 or the surrounding nucleotides. In one embodiment, the antisense oligonucleotide is complementary to a portion of SEQ ID NO: 220.

[0064] In another embodiment, the antisense oligonucleotide as described herein is complementary to a portion of Exon 11 of MUC5AC. In one embodiment, the antisense oligonucleotide is complementary to a portion of SEQ ID NO: 2296. In one embodiment, the antisense oligonucleotide is complementary to Exon 11 or the surrounding nucleotides. In one embodiment, the antisense oligonucleotide is complementary to a portion of SEQ ID NO: 221.

[0065] In another embodiment, the antisense oligonucleotide as described herein is complementary to a portion of Exon 13 of MUC5AC. In one embodiment, the antisense oligonucleotide is complementary to a portion of SEQ ID NO: 2297. In one embodiment, the antisense oligonucleotide is complementary to Exon 13 or the surrounding nucleotides. In one embodiment, the antisense oligonucleotide is complementary to a portion of SEQ ID NO: 222.

[0066] In another embodiment, the antisense oligonucleotide as described herein is complementary to a portion of Exon 16 of MUC5AC. In one embodiment, the antisense oligonucleotide is complementary to a portion of SEQ ID NO: 251. In one embodiment, the antisense oligonucleotide is complementary to Exon 16 or the surrounding nucleotides. In one embodiment, the antisense oligonucleotide is complementary to a portion of SEQ ID NO: 223.

[0067] In another embodiment, the antisense oligonucleotide as described herein is complementary to a portion of Exon 17 of MUC5AC. In one embodiment, the antisense oligonucleotide is complementary to a portion of SEQ ID NO: 252. In one embodiment, the antisense oligonucleotide is complementary to Exon 17 or the surrounding nucleotides. In one embodiment, the antisense oligonucleotide is complementary to a portion of SEQ ID NO: 224.

[0068] In another embodiment, the antisense oligonucleotide as described herein is complementary to a portion of Exon 18 of MUC5AC. In one embodiment, the antisense oligonucleotide is complementary to a portion of SEQ ID NO: 253. In one embodiment, the antisense oligonucleotide is complementary to Exon 18 or the surrounding nucleotides. In one embodiment, the antisense oligonucleotide is complementary to a portion of SEQ ID NO: 225.

[0069] In another embodiment, the antisense oligonucleotide as described herein is complementary to a portion of Exon 19 of MUC5AC. In one embodiment, the antisense oligonucleotide is complementary to a portion of SEQ ID NO: 254. In one embodiment, the antisense oligonucleotide is complementary to Exon 19 or the surrounding nucleotides. In one embodiment, the antisense oligonucleotide is complementary to a portion of SEQ ID NO: 226.

[0070] In another embodiment, the antisense oligonucleotide as described herein is complementary to a portion of Exon 20 of MUC5AC. In one embodiment, the antisense oligonucleotide is complementary to a portion of SEQ ID NO: 255. In one embodiment, the antisense oligonucleotide is complementary to Exon 20 or the surrounding nucleotides. In one embodiment, the antisense oligonucleotide is complementary to a portion of SEQ ID NO: 227.

[0071] In another embodiment, the antisense oligonucleotide as described herein is complementary to a portion of Exon 21 of MUC5AC. In one embodiment, the antisense oligonucleotide is complementary to a portion of SEQ ID NO: 256. In one embodiment, the antisense oligonucleotide is complementary to Exon 21 or the surrounding nucleotides. In one embodiment, the antisense oligonucleotide is complementary to a portion of SEQ ID NO: 228.

[0072] In another embodiment, the antisense oligonucleotide as described herein is complementary to a portion of Exon 22 of MUC5AC. In one embodiment, the antisense oligonucleotide is complementary to a portion of SEQ ID NO: 257. In one embodiment, the antisense oligonucleotide is complementary to Exon 22 or the surrounding nucleotides. In one embodiment, the antisense oligonucleotide is complementary to a portion of SEQ ID NO: 229.

[0073] In another embodiment, the antisense oligonucleotide as described herein is complementary to a portion of Exon 26 of MUC5AC. In one embodiment, the antisense oligonucleotide is complementary to a portion of SEQ ID NO: 258. In one embodiment, the antisense oligonucleotide is complementary to Exon 26 or the surrounding nucleotides. In one embodiment, the antisense oligonucleotide is complementary to a portion of SEQ ID NO: 230.

[0074] In another embodiment, the antisense oligonucleotide as described herein is complementary to a portion of Exon 28 of MUC5AC. In one embodiment, the antisense oligonucleotide is complementary to a portion of SEQ ID NO: 259. In one embodiment, the antisense oligonucleotide is complementary to Exon 28 or the surrounding nucleotides. In one embodiment, the antisense oligonucleotide is complementary to a portion of SEQ ID NO: 231.

[0075] In another embodiment, the antisense oligonucleotide as described herein is complementary to a portion of Exon 29 of MUC5AC. In one embodiment, the antisense oligonucleotide is complementary to a portion of SEQ ID NO: 260. In one embodiment, the antisense oligonucleotide is complementary to Exon 29 or the surrounding nucleotides. In one embodiment, the antisense oligonucleotide is complementary to a portion of SEQ ID NO: 232.

[0076] In another embodiment, the antisense oligonucleotide as described herein is complementary to a portion of Exon 31 of MUC5AC. In one embodiment, the antisense oligonucleotide is complementary to a portion of SEQ ID NO: 271. In one embodiment, the antisense oligonucleotide is complementary to Exon 31 or the surrounding nucleotides. In one embodiment, the antisense oligonucleotide is complementary to a portion of SEQ ID NO: 272.

[0077] In another embodiment, the antisense oligonucleotide as described herein is complementary to a portion of Exon 4 of MUC5B. In one embodiment, the antisense oligonucleotide is complementary to a portion of SEQ ID NO: 2298. In one embodiment, the antisense oligonucleotide is complementary to Exon 4 or the surrounding nucleotides. In one embodiment, the antisense oligonucleotide is complementary to a portion of SEQ ID NO: 233.

[0078] In another embodiment, the antisense oligonucleotide as described herein is complementary to a portion of Exon 5 of MUC5B. In one embodiment, the antisense oligonucleotide is complementary to a portion of SEQ ID NO: 2299. In one embodiment, the antisense oligonucleotide is complementary to Exon 5 or the surrounding nucleotides. In one embodiment, the antisense oligonucleotide is complementary to a portion of SEQ ID NO: 234.

[0079] In another embodiment, the antisense oligonucleotide as described herein is complementary to a portion of Exon 6 of MUC5B. In one embodiment, the antisense oligonucleotide is complementary to a portion of SEQ ID NO: 2300. In one embodiment, the antisense oligonucleotide is complementary to Exon 6 or the surrounding nucleotides. In one embodiment, the antisense oligonucleotide is complementary to a portion of SEQ ID NO: 235.

[0080] In another embodiment, the antisense oligonucleotide as described herein is complementary to a portion of Exon 7 of MUC5B. In one embodiment, the antisense oligonucleotide is complementary to a portion of SEQ ID NO: 2301. In one embodiment, the antisense oligonucleotide is complementary to Exon 7 or the surrounding nucleotides. In one embodiment, the antisense oligonucleotide is complementary to a portion of SEQ ID NO: 236.

[0081] In another embodiment, the antisense oligonucleotide as described herein is complementary to a portion of Exon 8 of MUC5B. In one embodiment, the antisense oligonucleotide is complementary to a portion of SEQ ID NO: 2302. In one embodiment, the antisense oligonucleotide is complementary to Exon 8 or the surrounding nucleotides. In one embodiment, the antisense oligonucleotide is complementary to a portion of SEQ ID NO: 237.

[0082] In another embodiment, the antisense oligonucleotide as described herein is complementary to a portion of Exon 10 of MUC5B. In one embodiment, the antisense oligonucleotide is complementary to a portion of SEQ ID NO: 2303. In one embodiment, the antisense oligonucleotide is complementary to Exon 10 or the surrounding nucleotides. In one embodiment, the antisense oligonucleotide is complementary to a portion of SEQ ID NO: 238.

[0083] In another embodiment, the antisense oligonucleotide as described herein is complementary to a portion of Exon 11 of MUC5B. In one embodiment, the antisense oligonucleotide is complementary to a portion of SEQ ID NO: 2304. In one embodiment, the antisense oligonucleotide is complementary to Exon 11 or the surrounding nucleotides. In one embodiment, the antisense oligonucleotide is complementary to a portion of SEQ ID NO: 239.

[0084] In another embodiment, the antisense oligonucleotide as described herein is complementary to a portion of Exon 13 of MUC5B. In one embodiment, the antisense oligonucleotide is complementary to a portion of SEQ ID NO: 2305. In one embodiment, the antisense oligonucleotide is complementary to Exon 13 or the surrounding nucleotides. In one embodiment, the antisense oligonucleotide is complementary to a portion of SEQ ID NO: 240.

[0085] In another embodiment, the antisense oligonucleotide as described herein is complementary to a portion of Exon 16 of MUC5B. In one embodiment, the antisense oligonucleotide is complementary to a portion of SEQ ID NO: 261. In one embodiment, the antisense oligonucleotide is complementary to Exon 16 or the surrounding nucleotides. In one embodiment, the antisense oligonucleotide is complementary to a portion of SEQ ID NO: 241.

[0086] In another embodiment, the antisense oligonucleotide as described herein is complementary to a portion of Exon 17 of MUC5B. In one embodiment, the antisense oligonucleotide is complementary to a portion of SEQ ID NO: 262. In one embodiment, the antisense oligonucleotide is complementary to Exon 17 or the surrounding nucleotides. In one embodiment, the antisense oligonucleotide is complementary to a portion of SEQ ID NO: 242.

[0087] In another embodiment, the antisense oligonucleotide as described herein is complementary to a portion of Exon 18 of MUC5B. In one embodiment, the antisense oligonucleotide is complementary to a portion of SEQ ID NO: 263. In one embodiment, the antisense oligonucleotide is complementary to Exon 18 or the surrounding nucleotides. In one embodiment, the antisense oligonucleotide is complementary to a portion of SEQ ID NO: 243.

[0088] In another embodiment, the antisense oligonucleotide as described herein is complementary to a portion of Exon 19 of MUC5B. In one embodiment, the antisense oligonucleotide is complementary to a portion of SEQ ID NO: 264. In one embodiment, the antisense oligonucleotide is complementary to Exon 19 or the surrounding nucleotides. In one embodiment, the antisense oligonucleotide is complementary to a portion of SEQ ID NO: 244.

[0089] In another embodiment, the antisense oligonucleotide as described herein is complementary to a portion of Exon 20 of MUC5B. In one embodiment, the antisense oligonucleotide is complementary to a portion of SEQ ID NO: 265. In one embodiment, the antisense oligonucleotide is complementary to Exon 20 or the surrounding nucleotides. In one embodiment, the antisense oligonucleotide is complementary to a portion of SEQ ID NO: 245.

[0090] In another embodiment, the antisense oligonucleotide as described herein is complementary to a portion of Exon 21 of MUC5B. In one embodiment, the antisense oligonucleotide is complementary to a portion of SEQ ID NO: 266. In one embodiment, the antisense oligonucleotide is complementary to Exon 21 or the surrounding nucleotides. In one embodiment, the antisense oligonucleotide is complementary to a portion of SEQ ID NO: 246.

[0091] In another embodiment, the antisense oligonucleotide as described herein is complementary to a portion of Exon 22 of MUC5B. In one embodiment, the antisense oligonucleotide is complementary to a portion of SEQ ID NO: 267. In one embodiment, the antisense oligonucleotide is complementary to Exon 22 or the surrounding nucleotides. In one embodiment, the antisense oligonucleotide is complementary to a portion of SEQ ID NO: 247.

[0092] In another embodiment, the antisense oligonucleotide as described herein is complementary to a portion of Exon 26 of MUC5B. In one embodiment, the antisense oligonucleotide is complementary to a portion of SEQ ID NO: 268. In one embodiment, the antisense oligonucleotide is complementary to Exon 26 or the surrounding nucleotides. In one embodiment, the antisense oligonucleotide is complementary to a portion of SEQ ID NO: 248.

[0093] In another embodiment, the antisense oligonucleotide as described herein is complementary to a portion of Exon 28 of MUC5B. In one embodiment, the antisense oligonucleotide is complementary to a portion of SEQ ID NO: 269. In one embodiment, the antisense oligonucleotide is complementary to Exon 28 or the surrounding nucleotides. In one embodiment, the antisense oligonucleotide is complementary to a portion of SEQ ID NO: 249.

[0094] In another embodiment, the antisense oligonucleotide as described herein is complementary to a portion of Exon 29 of MUC5B. In one embodiment, the antisense oligonucleotide is complementary to a portion of SEQ ID NO: 270. In one embodiment, the antisense oligonucleotide is complementary to Exon 29 or the surrounding nucleotides. In one embodiment, the antisense oligonucleotide is complementary to a portion of SEQ ID NO: 250.

[0095] In another embodiment, the antisense oligonucleotide as described herein is complementary to a portion of Exon 31 of MUC5B. In one embodiment, the antisense oligonucleotide is complementary to a portion of SEQ ID NO: 273. In one embodiment, the antisense oligonucleotide is complementary to Exon 31 or the surrounding nucleotides. In one embodiment, the antisense oligonucleotide is complementary to a portion of SEQ ID NO: 274.

[0096] In some embodiments, the ASOs as described herein are targeted to portions of MUC5AC or MUC5B which are either unique to MUC5AC or MUC5B or common to MUC5AC and MUC5B, leading to a decrease in mRNA and protein production. In some embodiments, the target is unique to MUC5AC. In other embodiments, the target is unique to MUC5B. In yet other embodiments, the target is common to MUC5AC and MUC5B sequences.

[0097] In some embodiments, the antisense oligonucleotide as described herein is complementary to a portion of exon 4, exon 17, exon 26, or exon 31 of both MUC5AC and MUC5B.

[0098] In some embodiments, the antisense oligonucleotide as described herein is complementary to a portion of both Exon 4 (and/or the surrounding nucleotides) of MUC5A and Exon 4 (and/or the surrounding nucleotides) of MUC5B. In one embodiment, the antisense oligonucleotide is complementary to a portion of any combination of SEQ ID NO: 2290, SEQ ID NO: 215, SEQ ID NO: 2298, and SEQ ID NO: 233.

[0099] In some embodiments, the antisense oligonucleotide as described herein is complementary to a portion of both Exon 17 (and/or the surrounding nucleotides) of MUC5A and Exon 17 (and/or the surrounding nucleotides) of MUC5B. In one embodiment, the antisense oligonucleotide is complementary to a portion of any combination of SEQ ID NO: 252, SEQ ID NO: 224, SEQ ID NO: 262, and SEQ ID NO: 242.

[0100] In some embodiments, the antisense oligonucleotide as described herein is complementary to a portion of both Exon 26 (and/or the surrounding nucleotides) of MUC5A and Exon 26 (and/or the surrounding nucleotides) of MUC5B. In one embodiment, the antisense oligonucleotide is complementary to a portion of any combination of SEQ ID NO: 258, SEQ ID NO: 230, SEQ ID NO: 268, and SEQ ID NO: 248.

[0101] In some embodiments, the antisense oligonucleotide as described herein is complementary to a portion of both Exon 31 (and/or the surrounding nucleotides) of MUC5A and Exon 26 (and/or the surrounding nucleotides) of MUC5B. In one embodiment, the antisense oligonucleotide is complementary to a portion of any combination of SEQ ID NO: 271, SEQ ID NO: 272, SEQ ID NO: 273, and SEQ ID NO: 274.

[0102] In other embodiments, the ASOs as described herein create a premature stop codon in the MUC5AC, MUC5B, or both MUC5A and MUC5B mRNA.

[0103] In some embodiments, the antisense oligonucleotide comprises at least 14 bases, at least 15 bases, at least 16 bases, at least 17 bases, at least 18 bases, at least 19 bases, at least 20 bases, at least 21 bases, at least 22 bases, at least 23 bases, at least 24 bases, or at least 25 bases, or any value and range therebetween. Each possibility represents a separate embodiment of the invention.

[0104] In some embodiments, the antisense oligonucleotide comprises 14 to 25 bases, 14 to 24 bases, 14 to 23 bases, 14 to 22 bases, 14 to 21 bases, 14 to 20 bases, 14 to 19 bases, or 14 to 18 bases, or 14 to 17 bases. Each possibility represents a separate embodiment of the invention. In some embodiments, the antisense oligonucleotide comprises 17 to 22 bases.

[0105] In some embodiments, the term “complementary” refers to the ability of polynucleotides to form base pairs with one another. Base pairs are typically formed by hydrogen bonds between nucleotide units in antiparallel polynucleotide strands. Complementary polynucleotide strands can base pair in the Watson-Crick manner (e.g., A to T, A to U, C to G), or in any other manner that allows for the formation of duplexes. As persons skilled in the art are aware, when using RNA as opposed to DNA, uracil rather than thymine is the base that is considered to be complementary to adenosine. However, when a U is denoted in the context of the present invention, the ability to substitute a T is implied, unless otherwise stated.

[0106] In some embodiments, antisense oligonucleotides target nucleic acids and may comprise chemical modifications and motifs. Antisense oligonucleotides may modulate protein expression by binding to a target messenger pre-mRNA encoding the protein. In some embodiments, the binding of an antisense oligonucleotide to its target mRNA modulates the processing of pre-mRNA. In some embodiments, antisense oligonucleotides alter splicing of a pre-mRNA. In some embodiments, antisense oligonucleotides enhance skipping of one or more MUC5AC, MUC5B, or both MUC5AC and MUC5B exons. In other embodiments, antisense oligonucleotides reduce inclusion of one or more MUC5AC, MUC5B, or both MUC5AC and MUC5B exons.

[0107] As used herein, antisense oligonucleotide describes an oligonucleotide at least a portion of which is complementary to a target nucleic acid to which it is capable of hybridizing, resulting in at least one antisense activity.

[0108] As used herein, “antisense activity” describes any detectable and/or measurable change attributable to the hybridization of an antisense compound to its target nucleic acid. As used herein, “detecting” or “measuring” means that a test or assay for detecting or measuring is performed as reflected by changes in RNA length, sequence and amount. Such detection and/or measuring may result in a value of zero. Thus, if a test for detection or measuring results in a finding of no activity (activity of zero), the step of detecting or measuring the activity has nevertheless been performed.

[0109] In some embodiments, the antisense oligonucleotide comprises a chemical modification. In some embodiments, the chemical modification comprises a modification of a backbone of the antisense oligonucleotide. In some embodiments, the antisense oligonucleotide comprises one or more phosphate-ribose. In other embodiments, the antisense oligonucleotide comprises one or more phosphate-deoxyriboses. In other embodiments, the antisense oligonucleotide comprises one or more phosphorothioates. In other embodiments, the antisense oligonucleotide comprises one or more phosphorothioate-deoxyriboses. In other embodiments, the antisense oligonucleotide comprises one or more 2′-O-methyl-phosphorothioates (2OMPs). In other embodiments, the antisense oligonucleotide comprises one or more phosphorodiamidates morpholino (PMOs). In other embodiments, the antisense oligonucleotide comprises one or more peptide nucleic acids (PNAs). In other embodiments, the antisense oligonucleotide comprises one or more 2-methoxyethyl phosphorothioates (MOEs). In other embodiments, the antisense oligonucleotide comprises a constrained ethyl (cET) backbone. In other embodiments, the antisense oligonucleotide comprises an alternating locked nucleic acid (LNA) backbone. In other embodiments, the antisense oligonucleotide comprises one or more N3′-P5′ phosphoramidates. In other embodiments, the antisense oligonucleotide comprises one or more 2′-deoxy-2′-fluoro-o-d-arabino nucleic acids. In other embodiments, the antisense oligonucleotide comprises one or more cyclohexene nucleic acids (CeNAs). In other embodiments, the antisense oligonucleotide comprises one or more tricyclo-DNA (tcDNA) nucleic acids. In other embodiments, the antisense oligonucleotide comprises one or more 2-amino-2′-deoxyadenosines (DAPs). In other embodiments, the antisense oligonucleotide comprises one or more 2′-deoxy-2′-fluoro-o-D-arabinonucleic acids (FANAs). In other embodiments, the antisense oligonucleotide comprises a ligand-conjugated antisense (LICA). In other embodiments, the antisense oligonucleotide comprises a combination of any of the chemical modifications described herein.

[0110] In some embodiments, the chemical modification is a modification of a sugar of the antisense oligonucleotide. In some embodiments, the sugar modification comprises 2′-modified and conformationally constrained nucleotides. In other embodiments, the chemical modification comprises a 2′-fluoro modification. Thus, in some embodiments, the modified oligonucleotide comprises at least one modified sugar. In some embodiments, the at least one modified sugar is a bicyclic sugar, such as LNA, ENA or cEt. In some embodiments, the at least one modified sugar comprises a 2′-modified sugar moiety, such as 2′-O-methyl, 2′-F, 2′-O-methylethyl, or 2′-O-methoxyethyl.

[0111] In some embodiments, the chemical modification is a modification of a nucleobase of the antisense oligonucleotide. In some embodiments, the chemical modification is a modification of the 3′ terminal. In some embodiments, the chemical modification is a modification of the 5′ terminal. In some embodiment, the chemical modification is a combination of two or more of the modifications as described herein. In some embodiments, the oligonucleotide used in the compositions and methods as described herein is chimeric. In some embodiments, the oligonucleotide used in the compositions and methods as described herein comprises multiple types of modified nucleotides. In some embodiments, the oligonucleotide comprises mixtures of LNA/DNA or LNA/2′OMe/MOE-RNA. In other embodiments, the oligonucleotide comprises combinations of 2-thiothymidine, 3′-fluorohexitol nucleic acid (FHNA), cEt, a 5-modified pyrimidine base, and α,β constrained nucleic acid (α,β-CNA). In some embodiments, the oligonucleotide comprises Fluoroarabinonucleic acid (2′F-ANA).

[0112] In some embodiments, the oligonucleotide is a modified oligonucleotide. In some embodiments, the modified oligonucleotide comprises a nucleoside analogue modification, a modified nucleobase, a modified internucleoside linkage a modified sugar, or a combination thereof. In some embodiments, the modified oligonucleotide comprises at least one nucleoside analogue. In some embodiments, the modified oligonucleotide comprises at least one modified nucleobase. In some embodiments the at least one modified nucleobase is 5-methyl-cytosine. In some embodiments, the modified oligonucleotide comprises at least one modified internucleoside linkage. In some embodiments, the at least one modified internucleoside linkage is a phosphothioester internucleoside linkage.

[0113] In some embodiments, the modified oligonucleotide is a nucleic acid analogue, such as a peptide nucleic acid (PNA) or a morpholino.

[0114] In some embodiments, oligonucleotides are modified by attachment of one or more conjugate groups. In general, conjugate groups modify one or more properties of the attached oligonucleotide including but not limited to pharmacodynamics, pharmacokinetics, stability, binding, absorption, cellular distribution, cellular uptake, charge and clearance. Conjugate groups are linked directly or via an optional conjugate linking moiety or conjugate linking group to a parent compound such as an oligonucleotide. A conjugate group as described herein comprises intercalators, reporter molecules, polyamines, polyamides, polyethylene glycols, thioethers, polyethers, cholesterols, thiocholesterols, cholic acid moieties, folate, lipids, phospholipids, biotin, phenazine, phenanthridine, anthraquinone, adamantane, acridine, fluoresceins, rhodamines, coumarins, dyes or a combination thereof.

[0115] In some embodiments, a synthetic antisense oligonucleotide as described herein is fully chemically modified. In some embodiments, “fully chemical modified” as described herein describes an oligonucleotide in which the entire nucleotide sequence is chemically modified as described herein. In other embodiments, “fully chemical modified” indicates that all bases of an oligonucleotide are modified.

[0116] In other embodiments, a synthetic antisense oligonucleotide as described herein is comprised only of ribonucleic acids. In other embodiments, a synthetic antisense oligonucleotide as described herein lacks deoxyribonucleic acids. In other embodiments, a synthetic antisense oligonucleotide as described herein lacks DNA bases.

[0117] In some embodiments, oligonucleotides of the present invention that are targeted to a MUC5A, MUC5B, or both MUC5A and MUC5B nucleic acids have chemically modified subunits arranged in patterns, or motifs, to confer to the oligonucleotide properties such as enhanced inhibitory activity, increased binding affinity for a target nucleic acid, enhanced cellular uptake, or resistance to degradation by in vivo nucleases. In some embodiments, the chemically modified oligonucleotides may have a modification in one or more regions.

[0118] In some embodiments, the oligonucleotide comprises a gapmer, which, in one embodiment, is a DNA antisense oligonucleotide structures with RNA-like segments on both sides of the sequence. In some embodiments, the gapmer antisense oligonucleotide is 12-22 nucleotides. In other embodiments, the oligonucleotide as described herein is not a gapmer.

[0119] In some embodiments, oligonucleotides may also be modified to have one or more stabilizing groups that are generally attached to one or both termini of the oligonucleotide to enhance properties such as, for example, nuclease stability. In some embodiments, the stabilizing group comprises a cap structure. In some embodiments, the terminal modifications protect the oligonucleotide from exonuclease degradation, and facilitate delivery and/or localization within a cell. In some embodiments, the cap is present at the 5′-terminus (5′-cap), at the 3′-terminus (3′-cap), or on both termini. Cap structures are well known in the art and include, for example, inverted deoxy basic caps.

[0120] In some embodiments, the chemical modification increases stability of the antisense oligonucleotide in a cell. In some embodiments, the chemical modification increases stability of the antisense oligonucleotide in vivo. In some embodiments, the chemical modification increases the antisense oligonucleotide's ability to modulate splicing. In some embodiments, the chemical modification increases the functional output of the antisense nucleotide. In some embodiments, the chemical modification increases the half-life of the antisense oligonucleotide. In some embodiments, the chemical modification inhibits polymerase extension from the 3′ end of the antisense oligonucleotide. In some embodiments, the chemical modification inhibits recognition of the antisense oligonucleotide by a polymerase.

[0121] In some embodiments, an oligonucleotide may have a sequence that has greater than 30% G-C content, greater than 40% G-C content, greater than 50% G-C content, greater than 60% G-C content, greater than 70% G-C content, or greater than 80% G-C content. An oligonucleotide may have a sequence that has up to 100% G-C content, up to 95% G-C content, up to 90% G-C content, or up to 80% G-C content. In some embodiments, the G-C content of an oligonucleotide is preferably between about 30-60%.

[0122] In some embodiments, a naked antisense oligonucleotide is delivered to cells. In other embodiments, the antisense oligonucleotide is bioconjugated or delivered via a nanocarrier. In some embodiment, the antisense oligonucleotide is non-covalently complexed with cationic polymers (for example, polyethylenimine), dendrimers, CPPs (for example, MPG-8, PepFect6, RVG-9R228, and Xentry-KALA). In other embodiments, the nanocarrier is a nanoparticle, which, in some embodiments, comprises a lipid nanoparticle. In some embodiments, a suitable lipid nanoparticle for the present invention comprises one or more of a cationic lipid, a non-cationic lipid, a cholesterol-based lipid, a PEG-modified lipid, an amphiphilic block copolymer and/or a polymer, or a combination thereof. In some embodiments, a lipid nanoparticle as described herein comprises a cationic lipid, DOPE or DEPE (non-cationic lipids), and DMG-PEG2K (PEG-modified lipid).

[0123] In some embodiments, the delivery potential of antisense oligonucleotides is enhanced through direct covalent conjugation of various moieties that promote intracellular uptake, target the drug to specific cells/tissues or reduce clearance from the circulation. These include lipids (for example, cholesterol that facilitates interactions with lipoprotein particles in the circulation), peptides (for cell targeting and/or cell penetration), aptamers, antibodies, and sugars (for example, N-acetylgalactosamine (GalNAc)).

[0124] In some embodiments, the antisense oligonucleotide is covalently conjugated to cell-targeting or cell-penetrating moieties. In some embodiments, the antisense oligonucleotide is delivered as part of an endogenous vesicle (exosome) loading. In other embodiments, the antisense oligonucleotide is delivered on spherical nucleic acids (SNAs). In other embodiments, nanotechnology applications (for example, DNA cages) and ‘smart’ materials are used for antisense oligonucleotide delivery.

[0125] In some embodiments, the antisense oligonucleotide is devoid of a labeling moiety. In some embodiments, the antisense oligonucleotide is not labeled. In some embodiments, the antisense oligonucleotide does not emit a detectable signal or does not comprise moieties capable of being recognized so as to enable nucleic acid detection (e.g., digoxigenin and fluorescently labeled anti-DIG antibody). In some embodiments, a detectable signal comprises a dye or an emitting energy which provides detection of a compound, e.g., a polynucleotide, in vivo or in vitro. In some embodiments, a detectable signal comprises: a fluorescent signal, a chromatic signal, or a radioactive signal.

[0126] In some embodiments, the antisense oligonucleotide is devoid of radioactive nucleobase(s); digoxigenin, streptavidin, biotin, a fluorophore, hapten label, CLICK label, amine label, or thiol label.

[0127] In other embodiments, the antisense oligonucleotide comprises a labeling moiety or a radioactive nucleobase as described hereinabove.

[0128] In some embodiments, the pre-mRNA to which the antisense oligonucleotide is targeted is wildtype pre-mRNA. In other embodiments, the pre-mRNA to which the antisense oligonucleotide is targeted is mutated pre-mRNA.

[0129] In some embodiments, the antisense oligonucleotide is specific to a MUC5AC, MUC5B, or both MUC5AC and MUC5B pre-mRNA. In some embodiments, the term “specific” refers to base pair specificity, gene specificity, or to both base pair and gene specificity. In some embodiments, the antisense oligonucleotide is specific to the MUC5AC, MUC5B, or both MUC5AC and MUC5B gene. In some embodiments, the antisense oligonucleotide masks a splice enhancing motif or region of MUC5AC, MUC5B, or both MUC5AC and MUC5B. In other embodiments, the antisense oligonucleotide enhances a splice silencing motif or region of MUC5AC, MUC5B, or both MUC5AC and MUC5B.

[0130] In some embodiments, the antisense oligonucleotide binds the MUC5AC, MUC5B, or both MUC5AC and MUC5B pre-mRNA with perfect or 100% complementarity. In other embodiments, the antisense oligonucleotide binds the MUC5AC, MUC5B, or both MUC5AC and MUC5B pre-mRNA with greater than 90% complementarity. In other embodiments, the antisense oligonucleotide binds the MUC5AC, MUC5B, or both MUC5AC and MUC5B pre-mRNA with greater than 95% complementarity. In other embodiments, the antisense oligonucleotide binds the MUC5AC, MUC5B, or both MUC5AC and MUC5B pre-mRNA with greater than 98% complementarity. In other embodiments, the antisense oligonucleotide binds the MUC5AC, MUC5B, or both MUC5AC and MUC5B pre-mRNA with greater than 99% complementarity. Each possibility represents a separate embodiment of the invention.

[0131] In one embodiment, the BLAST algorithm may be used to identify regions of similarity amongst different nucleic acids. In some embodiments, a comparison of the sequence of a target nucleic acid to other sequences throughout the genome may prevent the selection of antisense strand sequences that may hybridize in a non-specific manner to sequences other than a selected target nucleic acid (i.e., non-target or off-target sequences).

[0132] In some embodiments, the antisense oligonucleotide does not bind any gene product other than MUC5AC, MUC5B, or both MUC5AC and MUC5B with perfect complementarity. In some embodiments, the antisense oligonucleotide does not bind any gene other than MUC5AC, MUC5B, or both MUC5AC and MUC5B with a complementarity of greater than 70, 75, 80, 85, 90, 95, 97, or 99%. Each possibility represents a separate embodiment of the invention. In some embodiments, the antisense oligonucleotide does not bind any gene other than MUC5AC, MUC5B, or both MUC5AC and MUC5B with a complementarity of greater than 90%.

[0133] In some embodiments, the antisense oligonucleotide does not bind with perfect complementarity to anywhere in the genome of a cell other than within MUC5AC, MUC5B, or both MUC5AC and MUC5B. In some embodiments, the antisense oligonucleotide does not bind with complementarity of greater than 70, 75, 80, 85, 90, 95, 97, or 99% to anywhere in the genome of a cell other than within MUC5AC, MUC5B, or both MUC5AC and MUC5B. Each possibility represents a separate embodiment of the invention.

[0134] In some embodiments, a mutated pre-mRNA comprises at least one mutation in an exon of the MUC5AC, MUC5B, or both MUC5AC and MUC5B pre-mRNA. In other embodiments, a mutated pre-mRNA comprises at least one mutation in an intron of the MUC5AC, MUC5B, or both MUC5AC and MUC5B pre-mRNA.

[0135] In some embodiments, the antisense oligonucleotide is specific to a MUC5AC, MUC5B, or both MUC5AC and MUC5B pre-mRNA. In some embodiments, the term “specific” refers to base pair specificity, gene specificity, or to both base pair and gene specificity. In some embodiments, the antisense oligonucleotide is specific to the MUC5AC, MUC5B, or both MUC5AC and MUC5B gene. In some embodiments, the antisense oligonucleotide masks a splice enhancing motif, sequence, or region of MUC5AC, MUC5B, or both MUC5AC and MUC5B. In some embodiments, the antisense oligonucleotide enhances exon skipping. In some embodiments, the antisense oligonucleotide inhibits exon inclusion.

[0136] In some embodiments, the antisense oligonucleotide binds the MUC5AC, MUC5B, or both MUC5AC and MUC5B pre-mRNA with perfect or 100% complementarity. In other embodiments, the antisense oligonucleotide binds the MUC5AC, MUC5B, or both MUC5AC and MUC5B pre-mRNA with greater than 90% complementarity. In other embodiments, the antisense oligonucleotide binds the MUC5AC, MUC5B, or both MUC5AC and MUC5B pre-mRNA with greater than 95% complementarity. In other embodiments, the antisense oligonucleotide binds the MUC5AC, MUC5B, or both MUC5AC and MUC5B pre-mRNA with greater than 98% complementarity. In other embodiments, the antisense oligonucleotide binds the MUC5AC, MUC5B, or both MUC5AC and MUC5B pre-mRNA with greater than 99% complementarity. In other embodiments, the nucleobase sequence of the antisense strand of the oligonucleotide of the invention is at least 80%, at least 85%, at least 90%, at least 91%, at least 92%, at least 93%, at least 94%, at least 95%, at least 96%, at least 97%, at least 98%, at least 99%, or 100% complementary to an equal length portion of MUC5AC, MUC5B, or both MUC5AC and MUC5B pre-mRNA. Each possibility represents a separate embodiment of the invention.

[0137] In some embodiments, the antisense oligonucleotide does not bind any gene product other than MUC5AC, MUC5B, or both MUC5AC and MUC5B with perfect complementarity. In some embodiments, the antisense oligonucleotide does not bind any gene other than MUC5AC, MUC5B, or both MUC5AC and MUC5B with a complementarity of greater than 70, 75, 80, 85, 90, 95, 97, or 99%. Each possibility represents a separate embodiment of the invention. In some embodiments, the antisense oligonucleotide does not bind any gene other than MUC5AC, MUC5B, or both MUC5AC and MUC5B with a complementarity of greater than 90%.

[0138] In some embodiments, the antisense oligonucleotide does not bind with perfect complementarity to anywhere in the genome of a cell other than within MUC5AC, MUC5B, or both MUC5AC and MUC5B. In some embodiments, the antisense oligonucleotide does not bind with complementarity of greater than 70, 75, 80, 85, 90, 95, 97, or 99% to anywhere in the genome of a cell other than within MUC5AC, MUC5B, or both MUC5AC and MUC5B. Each possibility represents a separate embodiment of the invention. In some embodiments, the cell is a mammalian cell. In some embodiments, the mammal is a human.

[0139] In some embodiments, a mutated pre-mRNA comprises at least one mutation in an exon of the MUC5AC, MUC5B, or both MUC5AC and MUC5B pre-mRNA. In other embodiments, a mutated pre-mRNA comprises at least one mutation in an intron of the MUC5AC, MUC5B, or both MUC5AC and MUC5B pre-mRNA.

[0140] In some embodiments, the mutation comprises an early signal for termination of translation or a premature termination codon. In some embodiments, the mutation comprises a frameshift mutation. In some embodiments, the mutation comprises a missense mutation. In other embodiments, the mutation comprises a nonsense mutation. In some embodiments, the mutation comprises a substitution mutation in the MUC5AC, MUC5B, or both MUC5AC and MUC5B encoding gene, pre-mRNA encoded therefrom, or protein product thereof.

[0141] In some embodiments, the antisense oligonucleotide binds to an intronic sequence in the MUC5AC, MUC5B, or both MUC5AC and MUC5B pre-mRNA. In some embodiments, the antisense oligonucleotide binds to an intronic sequence that is distant from an exon, an intron-exon junction, or both. In some embodiments, the binding of an antisense oligonucleotide to an intronic sequence in the MUC5AC, MUC5B, or both MUC5AC and MUC5B pre-mRNA enhances exon skipping. In some embodiments, the binding of an antisense oligonucleotide to an exon sequence in the MUC5AC, MUC5B, or both MUC5AC and MUC5B pre-mRNA reduces exon inclusion.

[0142] In some embodiments, distant comprises at least 50 base pairs (bp), at least 100 bp, at least 200 bp, at least 350 bp, at least 500 bp, at least 750 bp, at least 1,000 bp, at least 2,000 bp, at least 3,500 bp, at least 5,000 bp, at least 7,500 bp, or at least 10,000 bp upstream to an exon, an intron-exon junction, or both, or downstream to an exon, an intro-exon junction, or both, or any value and range therebetween. Each possibility represents a separate embodiment of the invention.

[0143] In some embodiments, the antisense oligonucleotide modulates expression of MUC5AC, MUC5B, or both MUC5AC and MUC5B. In some embodiments, the antisense oligonucleotide modulates splicing of MUC5AC, MUC5B, or both MUC5AC and MUC5B. In some embodiments, the antisense oligonucleotide modulates splicing of an exon of MUC5AC, MUC5B, or both MUC5AC and MUC5B.

[0144] In some embodiments, the antisense oligonucleotide does not fully or partially bind (e.g., complement) to a sequence within a gene other than MUC5AC or MUC5B. In other embodiments, although the antisense oligonucleotide may partially or fully bind (e.g., complement) to an intronic sequence within a gene other than MUC5AC or MUC5B, it does not induce splicing or modify transcription in the non-MUC5AC or MUC5B gene.

[0145] In some embodiments, the antisense oligonucleotide does not cause an off-target effect. In some embodiments, off-target is a target other than MUC5AC. In other embodiments, off-target is a target other than MUC5B. In other embodiments, off-target is a target other than MUC5AC and MUC5B. In some embodiments, off-target is a target other than splicing of an exon of MUC5AC, MUC5B, or both MUC5AC and MUC5B. In some embodiments, the antisense oligonucleotide does not substantially or significantly modulate expression of a gene other than MUC5AC, MUC5B, or both MUC5AC and MUC5B. In some embodiments, the antisense oligonucleotide does not substantially or significantly modulate splicing of a gene other than MUC5AC, MUC5B, or both MUC5AC and MUC5B. In some embodiments, the antisense oligonucleotide does not substantially or significantly modulate splicing of an exon other than an exon of MUC5AC, MUC5B, or both MUC5AC and MUC5B. In some embodiments, substantial modulation of expression is a change in expression of at least 5%, 10%, 15%, 20%, 25%, 30%, 35%, 40%, 45% or 50%. Each possibility represents a separate embodiment of the invention. In some embodiments, substantial modulation of expression is a change in expression of at least 20%.

[0146] In some embodiments, an antisense oligonucleotide as described herein, or a pharmaceutical composition comprising an antisense oligonucleotide as described herein, is used in the modulation of splicing of a MUC5AC, MUC5B, or both MUC5AC and MUC5B pre-mRNA transcribed from a MUC5AC, MUC5B, or both MUC5AC and MUC5B genes.

[0147] In some embodiments, the phrase “modulation of splicing” refers to affecting a change in the level of any RNA or mRNA variant produced by the MUC5AC, MUC5B, or both MUC5AC and MUC5B native pre-mRNA. For example, in some embodiments, modulation comprises causing a decrease in the level of abnormal MUC5AC, MUC5B, or both MUC5AC and MUC5B mRNA.

[0148] In other embodiments, modulation comprises causing a decrease in the level of normal, full-length MUC5AC, MUC5B, or both MUC5AC and MUC5B mRNA. In some embodiments, the normal mRNA comprises a non-mutated exon. In other embodiments, the MUC5AC, MUC5B, or both MUC5AC and MUC5B pre-mRNA is devoid of a mutation. In some embodiments, the MUC5AC, MUC5B, or both MUC5AC and MUC5B pre-mRNA is a wildtype pre-mRNA. In one embodiment, normal comprises wild-type and abnormal comprises non-wild-type.

[0149] In other embodiments, modulation comprises causing a decrease in the level of both normal and abnormal MUC5AC, MUC5B, or both MUC5AC and MUC5B mRNA.

[0150] It is therefore evident that any change in ratio between certain MUC5AC, MUC5B, or both MUC5AC and MUC5B splicing variants is also considered to be the result of splicing modulation. Each possibility represents a separate embodiment of the invention.

[0151] In some embodiments, antisense oligonucleotides as described herein are single-stranded.

[0152] In some embodiments, the antisense oligonucleotide as described herein comprises an active fragment of an ASO as described herein.

[0153] In some embodiments, the term “active fragment” refers to a fragment that is 100% identical to a contiguous portion of the full nucleotide sequence of the antisense oligonucleotide, providing that at least: 30%, 40%, 50%, 60%, 70%, 80% or 90% of the activity of the original antisense oligonucleotide nucleotide sequence is retained, or any value and range therebetween. Each possibility represents a separate embodiment of the present invention.

[0154] The present invention also provides a vector comprising one or more oligonucleotides as described herein. Examples of appropriate vectors include adenoviral, lentiviral, adeno-associated viral (AAV), poliovirus, herpes simplex virus (HSV), or murine Maloney-based viral vectors. In one embodiment, the vector is an adeno-associated virus vector. In some embodiments, these cassettes and vectors may be contained in a cell, such as a mammalian cell. In some embodiments, a non-human mammal may comprise the cassette or vector.

[0155] In some embodiments, the present invention also provides a cell comprising one or more oligonucleotides as described herein. In some embodiments, the cell comprises a mammalian cell. In some embodiments, the mammal is a human. In some embodiments, a cell as described herein comprises nucleic acid molecules, expression cassettes or vectors as described herein. In some embodiments, a non-human mammal comprises the nucleic acid molecules, expression cassettes or vectors as described herein.

[0156] In some embodiments, the cell is derived from the subject as described herein. In some embodiments, the cell comprises a cell line or a culture thereof. In some embodiments, the cell is an epithelial cell. In some embodiments, an epithelial cell comprises a respiratory epithelial cell. In some embodiments, a respiratory epithelial cell is derived from the upper respiratory system. In some embodiments, a respiratory epithelial cell is a ciliated columnar epithelial cell. In some embodiments, a respiratory epithelial cell is a ciliated pseudostratified columnar epithelial cell. In some embodiments, a respiratory epithelial cell is selected from: a ciliated cell, a goblet cell, a club cell, an airway basal cell, or any combination thereof. In other embodiments, an epithelial cell comprises a nasal epithelial cell. In other embodiments, an epithelial cell comprises a bronchial epithelial cell.

[0157] In some embodiments, the present invention provides a nucleic acid, an expression cassette, a vector, or a composition as described herein for use in therapy, such as for treating a lung disease or disorder, as described herein.

[0158] In some embodiments, oligonucleotides as described herein may hybridize to a MUC5AC or MUC5B nucleic acid in any stage of RNA processing. For example, described herein are oligonucleotides that are complementary to a pre-mRNA. Additionally, oligonucleotides described herein may hybridize to any element of a MUC5AC or MUC5B nucleic acid. For example, described herein are oligonucleotides that are complementary to an exon, an intron, the 5′ UTR, the 3′ UTR, a repeat region, a splice junction, an exon:exon splice junction, an exonic splicing silencer, or an exonic splicing enhancer.

[0159] In some embodiments, a MUC5 antisense oligonucleotide as described herein is targeted to a respiratory epithelial cell, which in one embodiment, comprises a ciliated cell, a goblet cell, a club cell, an airway basal cell, or any combination thereof.

### Pharmaceutical Compositions

### Formulations

[0160] According to some embodiments, the present invention provides a composition comprising an antisense oligonucleotide as described herein.

[0161] In some embodiments, the composition further comprises one or more non-toxic, pharmaceutically acceptable carriers and/or diluents and/or adjuvants (collectively referred to herein as “carrier” materials) and, if desired, other active ingredients.

[0162] The term “pharmaceutically acceptable carrier” in some embodiments refers to any of the standard pharmaceutical carriers known in the field such as sterile solutions, tablets, coated tablets, and capsules. Typically, such carriers contain excipients such as starch, milk, sugar, certain types of clay, gelatin, stearic acids, or salts thereof, magnesium or calcium stearate, talc, vegetable fats or oils, gums, glycols, or other known excipients. Such carriers may also include flavor and color additives or other ingredients. Examples of pharmaceutically acceptable carriers include, but are not limited to: water, saline, buffers, inert, nontoxic solids (e.g., mannitol, talc). In some embodiments, the diluent or carrier is as an aqueous solution. In some embodiments, the solution may include a buffer, which in some embodiments, comprises phosphate-buffered saline (PBS). Compositions comprising such carriers are formulated by well-known conventional methods. Depending on the intended mode of administration and the intended use, the compositions may be in the form of solid, semi-solid, or liquid dosage forms, such, for example, as powders, granules, crystals, liquids, suspensions, liposomes, nanoparticles, nano-emulsions, pastes, creams, salves, etc., and may be in unit-dosage forms suitable for administration of relatively precise dosages.

[0163] In some embodiments, the pharmaceutical composition may be administered by any suitable route, preferably in the form of a pharmaceutical composition adapted to such a route, and in a dose effective for the treatment intended. The carrier mixture may be filled into a gelatin capsule or compressed as a tablet. The pharmaceutical composition may be administered, in some embodiments, as an oral dosage form or as an infusion.

[0164] In some embodiments, the pharmaceutical composition is formulated for administration by inhalation. In some embodiments, the pharmaceutical composition is formulated for intrapulmonary administration. In some embodiments, the composition is a pharmaceutical composition.

[0165] In some embodiments, the pharmaceutical composition is formulated for oral administration. In some embodiments, the pharmaceutical composition is formulated for nasal administration. In some embodiments, the pharmaceutical composition is formulated for intranasal administration.

[0166] In some embodiments, pulmonary delivery is via nebulization of the compound using a nebulizer, preferably a mesh nebulizer. In some embodiments, the nebulizer delivers the compound to lung cells in the form of an aerosol.

[0167] In some embodiments, the pharmaceutical composition is formulated for abdominal administration. In some embodiments, the pharmaceutical composition is formulated for subcutaneous administration. In some embodiments, the pharmaceutical composition is formulated for intra-peritoneal administration. In some embodiments, the pharmaceutical composition is formulated for intravenous administration. In some embodiments, the pharmaceutical composition is formulated for intramuscular administration. In some embodiments, the pharmaceutical composition is formulated for mucosal administration. In some embodiments, parenteral administration comprises intravascular, intraperitoneal, subcutaneous, intramuscular, and intrasternal administration.

[0168] Any pharmaceutical composition contemplated herein can, for example, be delivered orally via any acceptable and suitable oral preparations. Exemplary oral preparations, include, but are not limited to, for example, tablets, troches, lozenges, aqueous and oily suspensions, dispersible powders or granules, emulsions, hard and soft capsules, liquid capsules, syrups, and elixirs.

[0169] Exemplary injectable forms include, but are not limited to, for example, sterile aqueous solutions comprising acceptable vehicles and solvents, such as, for example, water, Ringer's solution, and isotonic sodium chloride solution; sterile oil-in-water microemulsions; and aqueous or oleaginous suspensions.

[0170] In other embodiments, the pharmaceutical composition is formulated as a nanoparticle, lipid nanoparticle, microparticle or liposome. In one embodiment, the antisense oligonucleotide as described herein is within or attached to a nanoparticle, lipid nanoparticle, microparticle, or liposome.

[0171] In some embodiments, the pharmaceutical composition is formulated for systemic administration.

[0172] In some embodiments, the pharmaceutical composition comprises an antisense oligonucleotide as described herein. In some embodiments, the composition comprises at least 1 nM, at least 2.5 nM, at least 10 nM, at least 100 nM, at least 0.5 μM, at least 1 μM, at least 10 μM, at least 20 μM, at least 50 μM, at least 100 μM, at least 250 μM, or at least 500 μM of the antisense oligonucleotide or any value and range therebetween. In some embodiments, the composition comprises 2.5 nM to 10 nM, 1 nM to 100 nM, 1 nM to 0.5 μM, 1 nM to 1 μM, 1 nM to 10 μM, 10 nM to 20 μM, 100 nM to 50 μM, 1 μM to 100 μM, 1 μM to 250 μM, or 1 μM to 500 μM, of the antisense oligonucleotide. In other embodiments, the composition comprises 5 nM to 25 nM, 10 nM to 50 nM, 20 nM to 100 nM, 50 nM to 0.5 μM of the antisense oligonucleotide. Each possibility represents a separate embodiment of the invention.

[0173] The pharmaceutically active compounds of this invention can be processed in accordance with conventional methods of pharmacy to produce medicinal agents for administration to subjects, including humans and other mammals. The pharmaceutical compositions may be subjected to conventional pharmaceutical operations such as sterilization and/or may contain conventional adjuvants, such as preservatives, stabilizers, wetting agents, emulsifiers, buffers etc. Tablets and pills can additionally be prepared with enteric coatings. Such pharmaceutical compositions may also comprise adjuvants, such as wetting, sweetening, flavoring, and perfuming agents.

[0174] The amounts of compounds that are administered and the dosage regimen for treating a disease or condition of this invention depends on a variety of factors, including the age, weight, gender, the medical condition of the subject, the type of disease, the severity of the disease, the route and frequency of administration, and the particular compound employed. Thus, the dosage regimen may vary widely, but can be determined routinely using standard methods.

[0175] For therapeutic purposes, the active compounds of this invention are ordinarily combined with one or more adjuvants appropriate to the indicated route of administration. If administered orally, the compounds may be admixed with lactose, sucrose, trehalose, starch powder, cellulose esters of alkanoic acids, cellulose alkyl esters, talc, stearic acid, magnesium stearate, magnesium oxide, sodium and calcium salts of phosphoric and sulfuric acids, gelatin, acacia gum, sodium alginate, polyvinylpyrrolidone, and/or polyvinyl alcohol, and then tableted or encapsulated for convenient administration. Such capsules or tablets may contain a controlled-release formulation as may be provided in a dispersion of active compound in hydroxypropylmethyl cellulose.

### Combination Treatments/Therapies

[0176] In some embodiments, compositions as described herein comprise an oligonucleotide as described herein and one or more active pharmaceutical ingredients for the treatment of a lung disease or disorder.

[0177] In some embodiments, the additional active pharmaceutical ingredient comprises a corticosteroid, a short-acting bronchodilator (e.g., albuterol, levalbuterol, ipratropium, or a combination of albuterol and ipratropium), a long-acting bronchodilator (e.g., aclidinium, arformoterol, formoterol, glycopyrrolate, indacaterol, olodaterol, salmeterol, tiotropium, umeclidinium or combinations thereof), methylxanthines and corticosteroids (e.g., fluticasone, budesonide, or prednisolone, alone or in combination with long-acting bronchodilator), or any combination thereof. In one embodiment, a long-acting bronchodilator comprises a long-acting beta agonist (LABA), a long-acting muscarinic antagonist (LAMA), or a combination thereof. In some embodiments, the additional active pharmaceutical ingredient comprises oral phosphodiesterase 4 inhibitors (e.g., roflumilast), macrolide antibiotics, or a combination thereof. In some embodiments, the latter ingredient is administered in addition to other active pharmaceutical ingredients and in addition to the antisense oligonucleotide described herein.

[0178] In other embodiments, the additional active pharmaceutical ingredient comprises an agent targeting mucus hypersecretion.

[0179] In one embodiment, the mucus-hypersecreting-targeting agent prevents cholinergic bronchoconstriction, which in one embodiment, is via high-affinity binding to transmembrane Gq-coupled airway muscarinic M3 receptors, which in one embodiment, inhibits ACh-dependent and IP3-mediated release of Ca2+ from intracellular stores. In some embodiments, the agent comprises Tiotropium.

[0180] In another embodiment, the mucus-hypersecreting-targeting agent comprises Roflumilast, which, in one embodiment, affects inflammation produced by eosinophils and neutrophils, airway remodeling, and bronchoconstriction.

[0181] In another embodiment, the mucus-hypersecreting-targeting agent binds cytokines and/or chemokines, such as IFN-7 and IL-8, protecting them from proteolytic degradation thus increasing their activities or binds effector molecules responsible for leukocyte recruitment to the site of infection/injury. In some embodiments, the agent comprises heparan sulfate.

[0182] In another embodiment, the mucus-hypersecreting-targeting agent decreases oxidative biomarkers in peripheral blood and exhaled breath condensate. In some embodiments, the agent comprises N-acetylcysteine.

[0183] In another embodiment, the mucus-hypersecreting-targeting agent comprises carbocisteine or another drug that is mucoactive with in vitro free-radical scavenging and anti-inflammatory properties.

[0184] In another embodiment, the mucus-hypersecreting-targeting agent comprises Salmeterol or Formoterol or another beta-2 adrenergic agonist.

[0185] In some embodiments, the corticosteroid is an inhaled corticosteroid (ICS). In other embodiments, the corticosteroid is a topical corticosteroid. In other embodiments, the additional active pharmaceutical ingredient comprises a LAMA, a LABA, and an ICS (triple inhaled therapy).

[0186] Accordingly, the combination therapies of the present invention may be administered together with other therapies useful in the treatment of a lung disease or disorder or related diseases. The invention herein further comprises use of a first composition and a second composition as described herein in preparing medicaments for the treatment of a lung disease or disorder or related diseases.

[0187] In other embodiments, the antisense oligonucleotides of the present invention can be formulated or co-administered with other therapeutic agents that are selected for their particular usefulness in addressing side effects associated with the conditions associated with a lung disease or disorder. For example, compounds of the invention may be formulated with agents to treat or suppress infections, such as antibiotics. In other embodiments, other therapeutic agents comprise aspirin, warfarin, phenylbutazone, ibuprofen, suprofen, fenbufen, ketoprofen, (S)-(+)-pranoprofen, carprofen, dansylsarcosine, 2,3,5-triiodobenzoic acid, flufenamic acid, folinic acid, a benzothiadiazide, chlorothiazide, a diazepine, indo-methicin, a barbiturate, a cephalosporin, a sulfa drug, an antidiabetic, or a combination thereof. In other embodiments, one or more therapeutic agents comprises a mucolytic agent, a bronchodialator, an antibiotic, an anti-infective agent, an anti-inflammatory agent, a corticosteroid, or a combination thereof.

[0188] The above other therapeutic agents, when employed in combination with the compounds of the present invention, may be used, for example, in those amounts indicated in the Physicians' Desk Reference (PDR) or as otherwise determined by one of ordinary skill in the art.

### Methods of Use

[0189] In some embodiments, the present invention provides a method for treating, preventing, ameliorating, or slowing progression of a lung disease or disorder in a subject.

[0190] In some embodiments, the subject has a lung disease or disorder. In some embodiments, the individual is at risk for developing a lung disease or disorder. In some embodiments, the lung disease or disorder is associated with overexpression of MUC5AC, MUC5B, or a combination thereof. In some embodiments, the subject has a lung disease or disorder that is not a cancer or tumor or neoplasm.

[0191] In other embodiments, the lung disease or disorder is associated with normal expression of MUC5AC, MUC5B, or a combination thereof. In some embodiments, normal expression is within the range of expression measured in healthy subjects.

[0192] In some embodiments, a subject as described herein has over-expression of MUC5AC, MUC5B, or both MUC5AC and MUC5B mRNA. In other embodiments, the subject has normal expression of MUC5AC, MUC5B, or both MUC5AC and MUC5B mRNA. In some embodiments, a subject as described herein has over-expression of MUC5AC, MUC5B, or both MUC5AC and MUC5B protein. In other embodiments, subject has normal expression of MUC5AC, MUC5B, or both MUC5AC and MUC5B protein. In some embodiments, over-expression of mRNA or protein is relative to healthy subjects.

[0193] In some embodiments, over-expression as described herein comprises a 15%-95% increase compared with control tissue. In other embodiments, over-expression comprises a 15% increase; a 20% increase; a 25% increase; a 30% increase; a 35% increase; increase; a 40% increase; a 45% increase; a 50% increase; a 55% increase; a 60% increase; a 65% increase; a 70% increase; a 75% increase; a 80% increase; a 85% increase; a 90% increase; or a 95% increase compared with control tissue. In other embodiments, over-expression comprises a 150% increase; a 200% increase; a 250% increase; a 300% increase; a 400% increase; a 450% increase; a 500% increase compared with control tissue.

[0194] In some embodiments, mRNA or protein level is compared to control tissue from the subject being treated prior to the onset of symptoms. In other embodiments, control tissue is from one or more subjects not having a lung disease or disorder as described herein. In other embodiments, control tissue is from one or more subjects not being diagnosed with a lung disease or disorder as described herein.

[0195] In some embodiments, a subject as described herein has increased activation of MUC5AC, MUC5B, or both MUC5AC and MUC5B protein. In some embodiments, the subject has increased secretion of MUC5AC, MUC5B, or both MUC5AC and MUC5B protein.

[0196] In some embodiments, increased activation and increased secretion as described herein comprises a 15%-95% increase compared with control tissue. In other embodiments, over-expression comprises a 15% increase; a 20% increase; a 25% increase; a 30% increase; a 35% increase; increase; a 40% increase; a 45% increase; a 50% increase; a 55% increase; a 60% increase; a 65% increase; a 70% increase; a 75% increase; a 80% increase; a 85% increase; a 90% increase; or a 95% increase compared with control tissue. In other embodiments, over-expression comprises a 150% increase; a 200% increase; a 250% increase; a 300% increase; a 400% increase; a 450% increase; a 500% increase compared with control tissue.

[0197] In other embodiments, a subject as described herein has normal activation of MUC5AC, MUC5B, or both MUC5AC and MUC5B protein. In some embodiments, the subject has normal secretion of MUC5AC, MUC5B, or both MUC5AC and MUC5B protein.

[0198] In some embodiments, the subject has reduced mucociliary function, reduced alveolar repair, and/or increased lung fibrosis.

[0199] In some embodiments, the present invention provides a method for treating a lung disease or disorder in a subject, comprising the step of administering to said subject an oligonucleotide as described herein. In other embodiments, the present invention provides a method for treating a lung disease or disorder in a subject, comprising the step of administering to said subject a vector as described herein. In other embodiments, the present invention provides a method for treating a lung disease or disorder in a subject, comprising the step of administering to said subject a cell as described herein. In other embodiments, the present invention provides a method for treating a lung disease or disorder in a subject, comprising the step of administering to said subject a composition as described herein.

[0200] In some embodiments, the lung disease or disorder comprises an airway disease. In some embodiments, the lung disease or disorder comprises a hypersecretory respiratory disease. In some embodiments, the lung disease or disorder comprises a muco-obstructive disease.

[0201] In one embodiment, the muco-obstructive disease comprises asthma. In another embodiment, the muco-obstructive disease comprises bronchitis. In another embodiment, the muco-obstructive disease comprises chronic obstructive pulmonary disease (COPD). In another embodiment, the muco-obstructive disease comprises cystic fibrosis (CF). In another embodiment, the muco-obstructive disease comprises non-CF Bronchiectasis (NCFB). In another embodiment, the muco-obstructive disease comprises primary ciliary dyskinesia. In another embodiment, the muco-obstructive disease comprises bronchiolitis obliterans. In another embodiment, the muco-obstructive disease comprises a combination of any two or more of the muco-obstructive diseases described herein.

[0202] In some embodiments, the subject has epithelial defects in ion-fluid transport, excessive mucus secretion, or a combination thereof. In some embodiments, the subject has hyperconcentrated or dehydrated mucus, failed mucus transport, mucus adhesion to airway surfaces, or a combination thereof. In other embodiments, the subject has normal levels of mucus secretion. In some embodiments, there is a change in the ratio between water and soluble components or solid materials within the mucus.

[0203] In some embodiments, the lung disease or disorder comprises a pulmonary fibrosis or a lung fibrosis. In one embodiment, the pulmonary fibrosis comprises idiopathic pulmonary fibrosis (IPF). In another embodiment, the pulmonary fibrosis comprises progressive pulmonary fibrosis (PPF). In another embodiment, the pulmonary fibrosis comprises fibrotic hypersensitivity pneumonitis. In another embodiment, the pulmonary fibrosis comprises connective tissue disease-associated interstitial lung disease (CTD-ILD). In some embodiments, the CTD-ILD comprises scleroderma-ILD, systemic sclerosis-ILD, Rheumatoid arthritis (RA)-ILD, Sjogren-ILD, systemic lupus erythematosus-ILD, polymyositis-ILD, dermatomyositis-ILD, mixed connective tissue disease-ILD, undifferentiated connective tissue disease-ILD, or another autoimmune-ILD known in the art.

[0204] In other embodiments, the lung disease or disorder comprises asthma, chronic rhinosinusitis (CRS), chronic obstructive pulmonary disease (COPD), diffuse panbronchiolitis (DPB), bronchitis, bronchiolitis obliterans, bronchiectasis, Non Cystic Fibrosis Bronchiectasis (NCFB), Primary Ciliary Dyskinesia (PCD), or bronchiectasis. In another embodiment, the pulmonary fibrosis comprises cystic fibrosis (CF). In other embodiments, the lung disease or disorder comprises lung cancer. In other embodiments, the lung disease or disorder comprises pneumonia, pulmonary emphysema, pulmonary edema, pulmonary embolus, pulmonary hypertension, sarcoidosis, pneumothorax, atelectasis, or a combination thereof. In other embodiments, the lung disease or disorder comprises idiopathic pulmonary fibrosis (IPF), progressive pulmonary fibrosis (PPF), fibrotic hypersensitivity pneumonitis, or CTD-ILD.

[0205] In some embodiments, asthma comprises allergic asthma, exercise-induced bronchoconstriction, cough-variant asthma, occupational asthma, nighttime (nocturnal) asthma, non-allergic asthma, or a combination thereof.

[0206] In some embodiments, the present invention provides a method for treating a major pulmonary fibrosis disease in a subject, comprising the step of administering to said subject an oligonucleotide as described herein. In other embodiments, the present invention provides a method for treating a major pulmonary fibrosis disease in a subject, comprising the step of administering to said subject a vector as described herein. In other embodiments, the present invention provides a method for treating a major pulmonary fibrosis disease in a subject, comprising the step of administering to said subject a cell as described herein. In other embodiments, the present invention provides a method for treating a major pulmonary fibrosis disease in a subject, comprising the step of administering to said subject a composition as described herein.

[0207] In some embodiments, the major pulmonary fibrosis disease comprises cystic fibrosis. In other embodiments, the major pulmonary fibrosis disease comprises idiopathic pulmonary fibrosis. In some embodiments, idiopathic pulmonary fibrosis is characterized by a chronic progressive decline in lung function, scarring of lung tissue, dyspnea (shortness of breath), or a combination thereof.

[0208] In some embodiments, the present invention provides a method for treating cystic fibrosis in a subject, comprising the step of administering to said subject an oligonucleotide, composition, vector, or cell as described herein. In some embodiments, the present invention provides a method for suppressing cystic fibrosis in a subject, comprising the step of administering to said subject an oligonucleotide, composition, vector, or cell as described herein. In some embodiments, the present invention provides a method for inhibiting cystic fibrosis in a subject, comprising the step of administering to said subject an oligonucleotide, composition, vector, or cell as described herein.

[0209] In some embodiments, the present invention provides a method for treating idiopathic pulmonary fibrosis in a subject, comprising the step of administering to said subject an oligonucleotide, composition, vector, or cell as described herein. In some embodiments, the present invention provides a method for suppressing idiopathic pulmonary fibrosis in a subject, comprising the step of administering to said subject an oligonucleotide, composition, vector, or cell as described herein. In some embodiments, the present invention provides a method for inhibiting idiopathic pulmonary fibrosis in a subject, comprising the step of administering to said subject an oligonucleotide, composition, vector, or cell as described herein.

[0210] In some embodiments, the present invention provides a method for treating CRS in a subject, comprising the step of administering to said subject an oligonucleotide, composition, vector, or cell as described herein. In some embodiments, the present invention provides a method for suppressing CRS in a subject, comprising the step of administering to said subject an oligonucleotide, composition, vector, or cell as described herein. In some embodiments, the present invention provides a method for inhibiting CRS in a subject, comprising the step of administering to said subject an oligonucleotide, composition, vector, or cell as described herein.

[0211] In some embodiments, the present invention provides a method for treating COPD in a subject, comprising the step of administering to said subject an oligonucleotide, composition, vector, or cell as described herein. In some embodiments, the present invention provides a method for suppressing COPD in a subject, comprising the step of administering to said subject an oligonucleotide, composition, vector, or cell as described herein. In some embodiments, the present invention provides a method for inhibiting COPD in a subject, comprising the step of administering to said subject an oligonucleotide, composition, vector, or cell as described herein.

[0212] In some embodiments, the present invention provides a method for treating DPB in a subject, comprising the step of administering to said subject an oligonucleotide, composition, vector, or cell as described herein. In some embodiments, the present invention provides a method for suppressing DPB in a subject, comprising the step of administering to said subject an oligonucleotide, composition, vector, or cell as described herein. In some embodiments, the present invention provides a method for inhibiting DPB in a subject, comprising the step of administering to said subject an oligonucleotide, composition, vector, or cell as described herein.

[0213] In some embodiments, the present invention provides a method for treating asthma in a subject, comprising the step of administering to said subject an oligonucleotide, composition, vector, or cell as described herein. In some embodiments, the present invention provides a method for suppressing asthma in a subject, comprising the step of administering to said subject an oligonucleotide, composition, vector, or cell as described herein. In some embodiments, the present invention provides a method for inhibiting asthma in a subject, comprising the step of administering to said subject an oligonucleotide, composition, vector, or cell as described herein.

[0214] In some embodiments, the present invention provides a method for treating Primary Ciliary Dyskinesia in a subject, comprising the step of administering to said subject an oligonucleotide, composition, vector, or cell as described herein. In some embodiments, the present invention provides a method for suppressing Primary Ciliary Dyskinesia in a subject, comprising the step of administering to said subject an oligonucleotide, composition, vector, or cell as described herein. In some embodiments, the present invention provides a method for inhibiting Primary Ciliary Dyskinesia in a subject, comprising the step of administering to said subject an oligonucleotide, composition, vector, or cell as described herein.

[0215] In some embodiments, the present invention provides a method for treating bronchiectasis in a subject, comprising the step of administering to said subject an oligonucleotide, composition, vector, or cell as described herein. In some embodiments, the present invention provides a method for suppressing bronchiectasis in a subject, comprising the step of administering to said subject an oligonucleotide, composition, vector, or cell as described herein. In some embodiments, the present invention provides a method for inhibiting bronchiectasis in a subject, comprising the step of administering to said subject an oligonucleotide, composition, vector, or cell as described herein.

[0216] In some embodiments, the present invention provides a method for treating NCFB in a subject, comprising the step of administering to said subject an oligonucleotide, composition, vector, or cell as described herein. In some embodiments, the present invention provides a method for suppressing NCFB in a subject, comprising the step of administering to said subject an oligonucleotide, composition, vector, or cell as described herein. In some embodiments, the present invention provides a method for inhibiting NCFB in a subject, comprising the step of administering to said subject an oligonucleotide, composition, vector, or cell as described herein.

[0217] In some embodiments, the present invention provides a method for treating bronchiolitis obliterans in a subject, comprising the step of administering to said subject an oligonucleotide, composition, vector, or cell as described herein. In some embodiments, the present invention provides a method for suppressing bronchiolitis obliterans in a subject, comprising the step of administering to said subject an oligonucleotide, composition, vector, or cell as described herein. In some embodiments, the present invention provides a method for inhibiting bronchiolitis obliterans in a subject, comprising the step of administering to said subject an oligonucleotide, composition, vector, or cell as described herein.

[0218] In some embodiments, the present invention provides a method for inhibiting mucous formation or excessive mucus formation in a subject, comprising the step of administering to said subject an oligonucleotide, composition, vector, or cell as described herein. In one embodiment, overexpression of MUC5AC, MUC5B, or both leads to excessive mucus formation. In some embodiments, mucus overexpression causes or exacerbates the symptoms associated with common lung diseases or disorders. In some embodiments, the present invention provides a method for increasing mucociliary function, increasing alveolar repair, decreasing lung fibrosis, or a combination thereof.

[0219] In some embodiments, a subject as described herein has a polymorphism in the promoter region of MUC5B. In one embodiment, the polymorphism comprises rs35705950, which, in some embodiments, is associated with familial and sporadic forms of idiopathic pulmonary fibrosis. In some embodiments, overexpression of MUC5B can result in one or more of the following outcomes: reduced mucociliary function, reduced alveolar repair, and increased lung fibrosis.

[0220] In other embodiments, the subject has a polymorphism in MUC5AC. In one embodiment, the polymorphism comprises rs1132440, rs17859812, or both. In other embodiments, the polymorphism comprises the MUC5AC 6.4 kb variable number tandem repeat (VNTR) allele.

[0221] Thus, in some embodiments, the lung disease or disorder to be treated using the methods described herein is the result of a genetic mutation or mutations or a genetic predisposition to the lung disease or disorder. In other embodiments, the lung disease or disorder is the result of workplace air pollutants, which in one embodiment, comprise organic dust, inorganic dust, chemical products, fumes, or a combination thereof. In other embodiments, the lung disease or disorder results from household air pollution, which in one embodiment, comprises chemical fire, coal fire, poor ventilation, or a combination thereof. In other embodiments, the lung disease or disorder results from smoke, which in one embodiment, comprises tobacco smoke. In some embodiments, the smoke exposure is at prenatal or postnatal stages, while, in other embodiments, the smoke exposure is in adulthood. In some embodiments, the smoke exposure is direct, while in other embodiments, the smoke exposure is indirect or “second-hand.”

[0222] In some embodiments, the subject for treatment using the methods as described herein comprise subjects having mucus metaplasia, bronchiolar smooth-muscle hypertrophy, mural edema, peribronchiolar fibrosis, excess mucus production in small airways, or a combination thereof.

[0223] Accordingly, in some embodiments, the methods of the present invention further comprise identifying a subject having a polymorphism prior to the step of treating the subject with one or more of the antisense oligonucleotides as described herein.

[0224] In some embodiments, the present invention provides a method for reducing the level of MUC5AC, MUC5B, or both MUC5AC and MUC5B mRNA and/or protein in a subject. In some embodiments, the oligonucleotide achieves at least 25% reduction in MUC5AC, MUC5B, or both MUC5AC and MUC5B mRNA and/or protein levels. In some embodiments, the oligonucleotide achieves at least 30% reduction in MUC5AC, MUC5B, or both MUC5AC and MUC5B mRNA and/or protein levels. In some embodiments, the oligonucleotide achieves at least 40% reduction in MUC5AC, MUC5B, or both MUC5AC and MUC5B mRNA and/or protein levels. In some embodiments, the oligonucleotide achieves at least 50% reduction in MUC5AC, MUC5B, or both MUC5AC and MUC5B mRNA and/or protein levels. In some embodiments, the oligonucleotide achieves at least 60% reduction in MUC5AC, MUC5B, or both MUC5AC and MUC5B mRNA and/or protein levels. In some embodiments, the oligonucleotide achieves at least 70% reduction in MUC5AC, MUC5B, or both MUC5AC and MUC5B mRNA and/or protein levels. In some embodiments, the oligonucleotide achieves at least 80% reduction in MUC5AC, MUC5B, or both MUC5AC and MUC5B mRNA and/or protein levels. In some embodiments, the oligonucleotide achieves at least 85% reduction in MUC5AC, MUC5B, or both MUC5AC and MUC5B mRNA and/or protein levels. In some embodiments, the oligonucleotide achieves at least 90% reduction in MUC5AC, MUC5B, or both MUC5AC and MUC5B mRNA and/or protein levels. In some embodiments, the oligonucleotide achieves at least 95% reduction in MUC5B mRNA and/or protein levels.

[0225] In some embodiments, the oligonucleotide achieves at least 10-90% reduction in MUC5AC, MUC5B, or both MUC5AC and MUC5B mRNA and/or protein levels. In some embodiments, the oligonucleotide achieves at least 20-80% reduction in MUC5AC, MUC5B, or both MUC5AC and MUC5B mRNA and/or protein levels. In some embodiments, the oligonucleotide achieves at least 30-70% reduction in MUC5AC, MUC5B, or both MUC5AC and MUC5B mRNA and/or protein levels. In some embodiments, the oligonucleotide achieves at least 40-60% reduction in MUC5AC, MUC5B, or both MUC5AC and MUC5B mRNA and/or protein levels. In some embodiments, the oligonucleotide achieves at least 30-40% reduction in MUC5AC, MUC5B, or both MUC5AC and MUC5B mRNA and/or protein levels.

[0226] In some embodiments, the present invention provides a method for reducing the level of functional or non-functional or both functional and non-functional MUC5AC, MUC5B, or both MUC5AC and MUC5B mRNA.

[0227] In other embodiments, the present invention provides a method of modulating splicing or expression of a MUC5AC, MUC5B, or both a MUC5AC and MUC5B transcript in a cell comprising contacting the cell with an antisense oligonucleotide, a vector, a cell, or a composition as described herein.

[0228] In some embodiments, “modulating” as used herein means changing the amount or quality of a molecule, function, or activity when compared to the amount or quality of a molecule, function, or activity prior to modulation. For example, modulation includes a change or a decrease (inhibition or reduction) in gene expression. As a further example, modulation of expression can include a change in splice site selection of pre-mRNA processing, resulting in a change in the absolute or relative amount of a particular splice-variant compared to the amount in the absence of modulation.

[0229] In other embodiments, the present invention provides a method of prolonging survival in a subject having a lung disease or disorder as described herein, comprising the steps of administering to the subject one or more antisense oligonucleotides as described herein. In other embodiments, the present invention provides a method of delaying progression of a lung disease or disorder as described herein in a subject having a lung disease or disorder as described herein, comprising the steps of administering to the subject one or more antisense oligonucleotides as described herein. In other embodiments, the present invention provides a method of avoiding resistance to therapy in a subject having a lung disease or disorder as described herein, comprising the steps of administering to the subject one or more antisense oligonucleotides as described herein.

[0230] In some embodiments, the present invention provides the use of an antisense oligonucleotide as described herein, or a pharmaceutical composition comprising the antisense oligonucleotide, for treating, suppressing or inhibiting a lung disease or disorder in a subject. In some embodiments, an antisense oligonucleotide as described herein, or a pharmaceutical composition comprising the antisense oligonucleotide, is used for improving at least one clinical parameter of a lung disease or disorder in a subject. In some embodiments, an antisense oligonucleotide as described herein, or a pharmaceutical composition comprising the antisense oligonucleotide, is used for alleviating symptoms of a lung disease or disorder in a subject.

[0231] In some embodiments, the present invention provides the use of a therapeutically acceptable amount of the compositions as described herein for treating, suppressing or inhibiting a lung disease or disorder in a subject. In other embodiments, the present invention provides the use of a therapeutically effective amount of the compositions as described herein for treating, suppressing or inhibiting a lung disease or disorder in a subject. In other embodiments, the present invention provides the use of a synergistically effective amount of a combination therapy as described herein for treating, suppressing or inhibiting a lung disease or disorder in a subject.

[0232] In some embodiments, the methods of the present invention further comprise the step of identifying a candidate subject for treatment with the compositions as described herein comprising the step of determining the levels of MUC5AC, MUC5B, or both MUC5AC and MUC5B mRNA in the subject. In other embodiments, the methods of the present invention further comprise the step of identifying a candidate subject for treatment with the compositions as described herein comprising the step of determining the levels of MUC5AC, MUC5B, or both MUC5AC and MUC5B protein in the subject. In other embodiments, the methods of the present invention further comprise the step of identifying a candidate subject for treatment with the compositions as described herein comprising the step of determining the functionality of MUC5AC, MUC5B, or both MUC5AC and MUC5B in the subject.

[0233] In other embodiments, the methods of the present invention further comprise the step of identifying a candidate subject for treatment with the compositions as described herein comprising the step of evaluating MUC5AC, MUC5B, or both MUC5AC and MUC5B gene function in the subject. In some embodiments, evaluating MUC5AC, MUC5B, or both MUC5AC and MUC5B gene function comprises determining if there are MUC5AC, MUC5B, or both MUC5AC and MUC5B mutations and if so, where the MUC5AC, MUC5B, or both MUC5AC and MUC5B mutations are located.

[0234] In some embodiments, evaluating MUC5AC, MUC5B, or both MUC5AC and MUC5B gene function comprises RNA-seq or another RNA sequencing tool to reveal the presence and quantity of RNA in a biological sample at a given point in time. In other embodiments, other methods of evaluating the quantity of MUC5AC, MUC5B, or both MUC5AC and MUC5B RNA that are known in the art may be utilized.

[0235] In other embodiments, the present invention provides a method of treating a lung disease or disorder comprising the step of evaluating the genetic material in a biological sample from the subject. In one embodiment, the genetic material is evaluated using an RNA sequencing method. In another embodiment, the genetic material is evaluated using a DNA sequencing method. In another embodiment, protein levels and/or function are evaluated in a biological sample from the subject.

[0236] In some embodiments, the biological sample comprises tissue. In some embodiments, the biological sample comprises blood cells. In other embodiments, the biological sample comprises a sputum sample. In other embodiments, the biological sample comprises epithelial cells, which, in some embodiments, are sampled from the inside of the subject's mouth. In other embodiments, the biological sample comprises nasal cells. In other embodiments, the biological sample comprises lung cells. It is to be understood that in some embodiments, more than one biological sample may be collected from the subject.

[0237] In some embodiments, the present invention provides a method for improving at least one clinical parameter of a lung disease or disorder in a subject. In other embodiments, the present invention provides a method for alleviating symptoms of a lung disease or disorder in a subject.

[0238] In some embodiments, alleviation of symptoms as described herein comprises a measured improvement of 15%-95%. In other embodiments, the measured improvement comprises a 15% improvement; a 20% improvement; a 25% improvement; a 30% improvement; a 35% improvement; improvement; a 40% improvement; a 45% improvement; a 50% improvement; a 55% improvement; a 60% improvement; a 65% improvement; a 70% improvement; a 75% improvement; a 80% improvement; a 85% improvement; a 90% improvement; or a 95% improvement.

[0239] In some embodiments, the methods as described herein comprise the step of administering a splicing modulator, which, in some embodiments, is an antisense oligonucleotide, which, in some embodiments, is a synthetic antisense oligonucleotide.

[0240] In other embodiments, the methods as described herein comprise the step of contacting a cell with a splicing modulator, which, in some embodiments, is an antisense oligonucleotide, which, in some embodiments, is a synthetic antisense oligonucleotide. In some embodiments, contacting comprises in vivo, in vitro, or ex vivo contacting.

[0241] In some embodiments, the subject has at least one mutation in a MUC5AC gene, MUC5B gene, or in both the MUC5AC and MUC5B genes or in the mRNA transcribed therefrom. In some embodiments, the subject is homozygous for one or more MUC5AC and/or MUC5B mutations. In some embodiments, the subject is heterozygous for one or more MUC5AC and/or MUC5B mutations.

[0242] In other embodiments, the subject has at least one polymorphism in a MUC5AC gene, MUC5B gene, or in both the MUC5AC and MUC5B genes or in the mRNA transcribed therefrom. In some embodiments, the subject is homozygous for one or more MUC5AC and/or MUC5B polymorphisms. In some embodiments, the subject is heterozygous for one or more MUC5AC and/or MUC5B polymorphisms. In some embodiment, the polymorphism is a single nucleotide polymorphism (SNP). In other embodiments, the polymorphism is a small-scale insertion/deletion. In other embodiments, the polymorphism is a polymorphic repetitive element. In other embodiments, the polymorphism is a microsatellite variation.

[0243] In some embodiments, the subject is suffering from lung inflammation. In some embodiments, the lung cells of the subject are overactivated. According to this aspect and in some embodiments, the lung cells are hyper-proliferative. In other embodiments, the lung cells produce and/or secrete abnormal levels of mucins. In some embodiments, the subject has hyperplasia of goblet cells.

[0244] In some embodiments, at least some of the cells of the subject over-express one or more mucins. In some embodiments, at least some of the cells of the subject over-express MUC5AC, MUC5B, or both MUC5AC and MUC5B mRNA. In some embodiments, at least some of the cells of the subject over-express MUC5AC, MUC5B, or both MUC5AC and MUC5B protein. In some embodiments, MUC5AC, MUC5B, or both MUC5AC and MUC5B in the airway cells of said subject are hyper-functional or hyperactive.

[0245] In some embodiments, the MUC5AC and/or MUC5B protein in the cells of the subject comprise a mixture of wild type, full-length, and fully functional MUC5AC and/or MUC5B protein encoded by the wild type allele and a mutated and deleterious MUC5AC and/or MUC5B protein encoded by the mutated allele.

[0246] In some embodiments, “a mutation” as described herein refers to one or more nucleotide substitutions or modifications which render a partially or fully non-functional protein. In some embodiments, a modification comprises an insertion, deletion, inversion, or a combination thereof. In some embodiment, the modification results in a disease phenotype in a subject harboring or comprising the modification.

[0247] In other embodiments, the present invention provides a method of treating, suppressing, or inhibiting a lung disease or disorder in a subject comprising the step of administering to the subject a composition comprising one or more antisense oligonucleotides as described herein. In other embodiments, the present invention provides a method of treating, suppressing, or inhibiting a lung disease or disorder in a subject comprising the step of administering to the subject a composition consisting essentially of one or more antisense oligonucleotides as described herein. In other embodiments, the present invention provides a method of treating, suppressing, or inhibiting a lung disease or disorder in a subject comprising the step of administering to the subject a composition consisting of one or more antisense oligonucleotides as described herein.

[0248] In other embodiments, the present invention provides a method of treating, suppressing, or inhibiting a cancer in a subject comprising the step of administering to the subject a composition comprising one or more antisense oligonucleotides as described herein. In other embodiments, the present invention provides a method of treating, suppressing, or inhibiting a cancer in a subject comprising the step of administering to the subject a composition consisting essentially of one or more antisense oligonucleotides as described herein. In other embodiments, the present invention provides a method of treating, suppressing, or inhibiting a cancer in a subject comprising the step of administering to the subject a composition consisting of one or more antisense oligonucleotides as described herein. In some embodiments, a symptom of the cancer is increased mucin production. In some embodiments, the cancer comprises pancreas, lung, breast, ovary, or colon cancer.

[0249] In other embodiments, the lung disease or disorder does not comprise lung cancer. In other embodiments, the lung disease or disorder does not comprise a lung adenocarcinoma. In other embodiments, the lung disease or disorder does not comprise a non-small cell lung cancer. In other embodiments, the lung disease or disorder comprises a cancer that does not comprise a KRAS mutation.

[0250] In other embodiments, the present invention provides a method of treating a non-cancerous lung disease or disorder in a subject, comprising the step of administering to said subject a composition comprising a synthetic antisense oligonucleotide targeting MUC5AC, MUC5B, or both MUC5AC and MUC5B and/or surrounding intronic sequences. In other embodiments, the present invention provides a method of suppressing or inhibiting a non-cancerous lung disease or disorder in a subject, comprising the step of administering to said subject a composition comprising a synthetic antisense oligonucleotide targeting MUC5AC, MUC5B, or both MUC5AC and MUC5B and/or surrounding intronic sequences.

[0251] In other embodiments, the present invention provides a method of reducing the levels of MUC5AC, MUC5B, or both MUC5AC and MUC5B in a cell of a subject comprising the step of administering to said subject an oligonucleotide, vector, cell, or composition as described herein. In other embodiments, the present invention provides a method of modulating MUC5AC or MUC5B expression or production. In some embodiments, MUC5A and MUC5B expression or production are modulated independently. In other embodiments, both MUC5A and MUC5B expression or production are modulated together.

[0252] In other embodiments, the present invention provides a method of inducing nonsense-mediated decay of MUC5AC, MUC5B, or both MUC5AC and MUC5B in a cell of a subject comprising the step of administering to said subject an oligonucleotide, vector, cell, or composition as described herein. In one embodiment, the oligonucleotide does not activate the RNAse H pathway.

[0253] In other embodiments, the present invention provides a method of splice switching MUC5AC, MUC5B, or both MUC5AC and MUC5B in a cell of a subject comprising the step of administering to said subject an oligonucleotide, vector, cell, or composition as described herein.

[0254] In other embodiments, the present invention provides a method of introducing an early termination codon to a MUC5AC, MUC5B, or both MUC5AC and MUC5B mRNA in a cell of a subject comprising the step of administering to said subject an oligonucleotide, vector, cell, or composition as described herein.

[0255] In other embodiments, the present invention provides a method of skipping over an exon of MUC5AC, MUC5B, or both MUC5AC and MUC5B mRNA in a cell of a subject comprising the step of administering to said subject an oligonucleotide, vector, cell, or composition as described herein.

[0256] In other embodiments, the present invention provides a method of exon skipping MUC5AC, MUC5B, or both MUC5AC and MUC5B mRNA, which leads to the generation of a premature stop codon. In some embodiments, transcripts carrying the stop codon are subjected to degradation by the Nonsense Mediated mRNA Decay mechanism (NMD), leading to a reduction in the transcript level. In some embodiments, transcripts that escape the NMD are translated to a short and non-functional protein.

[0257] In other embodiments, the present invention provides a method of improving mucociliary clearance (MCC) in a subject. In other embodiments, the present invention provides a method of reducing mucin hyperconcentration. In other embodiments, the present invention provides a method of decreasing transient respiratory infection. In other embodiments, the present invention provides a method of decreasing respiratory disease in a subject or the pathogenesis of respiratory disease in the subject. In other embodiments, the present invention provides a method of altering the relative amounts of MUC5AC and MUC5B in a cell or tissue of a subject. In other embodiments, the present invention provides a method of decreasing mucin concentration in sputum in a subject with CF. In other embodiments, the present invention provides a method of decreasing partial osmotic pressure, osmotic compression of the periciliary layer, mucociliary stasis in a subject with CF.

[0258] In other embodiments, the present invention provides a method of reducing mucus accumulation in the airway of a subject. In other embodiments, the present invention provides a method of reducing obstruction, infection, inflammation in the airway of a subject.

[0259] In some embodiments, a composition comprising a synthetic antisense oligonucleotide targeting MUC5AC, MUC5B, or both MUC5AC and MUC5B and/or surrounding intronic sequences is administered to said subject.

### Timing and Site of Administration

[0260] In some embodiments, in the methods of the present invention, one or more compositions or the antisense oligonucleotides as described herein is administered to a subject once per day. In some embodiments, one or more compositions or the antisense oligonucleotides as described herein are administered to a subject twice per day. In some embodiments, one or more compositions or the antisense oligonucleotides as described herein are administered to a subject three times per day. In some embodiments, one or more compositions or antisense oligonucleotides as described herein are administered to a subject four times per day. In some embodiments, one or more compositions or antisense oligonucleotides as described herein are administered to a subject once per week. In some embodiments, in the methods of the present invention, one or more compositions or the antisense oligonucleotides as described herein are administered once every two weeks. In some embodiments, in the methods of the present invention, one or more compositions or the antisense oligonucleotides as described herein are administered once every three weeks.

[0261] In some embodiments, one or more compositions as described herein is administered to a subject in one to four doses per day. In other embodiments, one or more compositions or antisense oligonucleotides as described herein are administered to a subject once every two days, once every three days, or twice a week.

[0262] In some embodiments, in the methods of the present invention, a composition as described herein comprising one or more antisense oligonucleotides is administered intermittently. In some embodiments, the intermittent administration comprises two days on/five days off. In other embodiments, the intermittent administration comprises three days on/four days off.

[0263] In some embodiments, a composition as described herein is administered on at least one day, at least two days, at least three days, at least four days, at least five days, at least six days, at least seven days, at least eight days, at least nine days, at least ten days, at least eleven days, at least twelve days, at least 13 days, at least 14 days, at least 21 days, or all 28 days of a 28-day treatment cycle.

[0264] In some embodiments, one or more of the compositions as described herein is administered for 7 days to 28 days. In other embodiments, one or more of the compositions as described herein is administered for 7 days to 8 weeks. In other embodiments, one or more of the compositions as described herein is administered for 7 days to 50 days. In other embodiments, one or more of the compositions as described herein is administered for 7 days to six months. In other embodiments, one or more of the compositions as described herein is administered for 7 days to one and half years. In other embodiments, one or more of the compositions as described herein is administered for 14 days to 12 months. In other embodiments, one or more of the compositions as described herein is administered for 14 days to 3 years. In other embodiments, one or more of the compositions as described herein is administered for one month to six months. In other embodiments, one or more of the compositions as described herein is administered for several years.

[0265] In some embodiments, one or more of the compositions as described herein is administered for 7 days. In other embodiments, one or more of the compositions as described herein is administered for 14 days. In other embodiments, one or more of the compositions as described herein is administered for 21 days. In other embodiments, one or more of the compositions as described herein is administered for 28 days. In other embodiments, one or more of the compositions as described herein is administered for 50 days. In other embodiments, one or more of the compositions as described herein is administered for 56 days. In other embodiments, one or more of the compositions as described herein is administered for 84 days. In other embodiments, one or more of the compositions as described herein is administered for 90 days. In other embodiments, one or more of the compositions as described herein is administered for 120 days.

[0266] In some embodiments, in the methods of the present invention, a first and second composition are administered for the desired treatment. In some embodiments, in the methods of the present invention, the first composition and the second composition are administered concurrently, i.e. at the same approximate time. In some embodiments, the first and second compositions are administered at the same site of administration. In some embodiments, in the methods of the present invention, the first composition and the second composition are administered at separate sites or at separate times. In some embodiments, the first composition is administered prior to the second composition. In other embodiments, the first composition is administered after the second composition. In some embodiments, concurrent administration comprises administering a single composition comprising the second composition and the first composition. In other embodiments, concurrent administration comprises administering separate compositions at approximately the same time.

[0267] In some embodiments, the first composition is administered several days before and after the administration of the second composition. In some embodiments, the first composition is administered 1, 2, 3, 4, or 5 days prior to the administration of the second composition. In some embodiments, the first composition is administered 1, 2, 3, 4, or 5 days subsequent to the administration of the second composition.

[0268] In some embodiments, the compositions of the present invention are administered to the subject on the same days. In some embodiments, the compositions of the present invention are administered to the subject on the different days.

[0269] The number of times a first or second composition is administered to a subject in need thereof depends on the discretion of a medical professional, the disorder, the severity of the disorder, and the subject's response to the formulation. In some embodiments, the first and second compositions disclosed herein are administered once to a subject in need thereof with a mild acute condition. In some embodiments, the first and second compositions disclosed herein are administered more than once to a subject in need thereof with a moderate or severe acute condition. In the case wherein the subject's condition does not improve, upon the doctor's discretion the first or second composition may be administered chronically, that is, for an extended period of time, including throughout the duration of the subject's life in order to ameliorate or otherwise control or limit the symptoms of the subject's disease or condition.

[0270] In the case wherein the subject's status does improve, upon the doctor's discretion, the first or second composition may be administered continuously; or, the dose of drug being administered may be temporarily reduced or temporarily suspended for a certain length of time (i.e., a “drug holiday”). In some embodiments, the length of the drug holiday varies between 2 days and 1 year. The dose reduction during a drug holiday may be from 10%- 100%, including by way of example only 10%, 15%, 20%, 25%, 30%, 35%, 40%, 45%, 50%, 55%, 60%, 65%, 70%, 75%, 80%, 85%, 90%, 95%, and 100%.

[0271] In some embodiments, the antisense oligonucleotides are delivered to cells that produce mucins, which in one embodiment, comprise epithelial cells, goblet cells, submucosal glands, club (clara) cells, or a combination thereof.

[0272] In some embodiments, MUC5AC antisense oligonucleotides are targeted to goblet cells. In some embodiments, MUC5AC antisense oligonucleotides are targeted to proximal, cartilaginous airways. In some embodiments, MUCSAC antisense oligonucleotides are administered to subjects with asthma.

[0273] In some embodiments, MUCSB antisense oligonucleotides are targeted to submucosal gland. In some embodiments, MUCSB antisense oligonucleotides are targeted to distal airway superficial epithelium. In some embodiments, MUCSB antisense oligonucleotides are administered to subjects with COPD. In other embodiments, MUCSB antisense oligonucleotides are administered to subjects with IPF.

### Experimental Procedures

### In Vivo Testing of Oligonucleotides

[0274] Oligonucleotides are tested in animals to assess their ability to reduce MUC5 mRNA and/or protein levels and produce phenotypic changes, such as improved mucociliary function, improved alveolar repair and reduced lung fibrosis. Testing may be performed in normal animals, or in experimental disease models. Calculation of oligonucleotide dosage and dosing frequency is within the abilities of those skilled in the art and depends upon factors such as route of administration and animal body weight. Following a period of treatment with oligonucleotides, RNA and/or protein is isolated from lung tissue and changes in MUC5 mRNA or protein levels are measured.

[0275] In some embodiments, the animal models used for testing comprise induction with ovalbumin, bleomycin, elastase, house dust mite (HDM) models for muco-obstructive or pulmonary fibrosis diseases. In other embodiments, the animal models are genetic mouse models for muco-obstructive or pulmonary fibrosis diseases. In other embodiments, the animal models comprise lipopolysaccharide (LPS)-exposed animals, or a combination thereof. In other embodiments, the animal model of lung disease comprises exposure to cigarette smoke.

### Mucus Measurements

### Molecular Methods

[0276] In some embodiments, the molecular methods used for measuring mucus comprise methods that are well-known in the art. In some embodiments, the methods comprise RT-PCR, quantitative RT-PCR; Northern-blot (RNA-blot) assay; luciferase reporter and chromatin immunoprecipitation (ChIP) assay (promoter-binding); transgenic or knockout animals; or a combination thereof.

### Protein Detection Methods

[0277] In some embodiments, the protein detection methods used for measuring mucus comprise methods that are well-known in the art. In some embodiments, the methods comprise determination of percent solid matter; ELISA; SDS-PAGE/western blot assay; Dot-blot (Slot-blot) assay, immune-fluorescence; or a combination thereof.

### Biochemical and Biophysical Methods

[0278] In some embodiments, the biochemical and biophysical methods used for measuring mucins comprise methods that are well-known in the art. In some embodiments, the methods comprise isolation, fractionation and purification of mucins; glycosylation analysis and mass spectrometry, measuring viscoelasticity of mucus (laser/light scattering analysis, direct rheometry, and fluorescence recovery after photobleaching (FRAP); or a combination thereof.

### Kits

[0279] In some embodiments, the present invention provides a kit comprising a therapeutic or prophylactic composition containing an effective amount of one or more antisense oligonucleotides, as described herein, and optionally a second composition comprising one or more therapeutic or prophylactic agents for treating a disease or disorder as described herein. In certain embodiments, the kit comprises a sterile container which contains therapeutic or prophylactic agents; such containers can be boxes, ampules, bottles, vials, tubes, bags, pouches, blister-packs, or other suitable container forms known in the art. Such containers can be made of plastic, glass, laminated paper, metal foil, or other materials suitable for holding medicaments. In some embodiments, the container is made of a material selected from the group consisting of thin-walled film or plastic (transparent or opaque), paperboard-based, foil, rigid plastic, metal (e.g., aluminum), glass, etc.

[0280] If desired, the composition(s) are provided together with instructions for administering the composition(s) to a subject having or at risk of developing a lung disease or disorder. The instructions will generally include information about the use of the composition for the treatment or prevention of a lung disease or disorder. In other embodiments, the instructions include at least one of the following: description of the therapeutic agent; dosage schedule and administration for treatment or prevention of a lung disease or disorder or symptoms thereof; precautions; warnings; indications; counter-indications; overdosage information; adverse reactions; animal pharmacology; clinical studies; and/or references. The instructions may be printed directly on the container (when present), or as a label applied to the container, or as a separate sheet, pamphlet, card, or folder supplied in or with the container.

[0281] In other embodiments, the instructions are present as an electronic storage data file present on a suitable computer readable storage medium. In other embodiments, the actual instructions are not present in the kit, but means for obtaining the instructions from a remote source, e.g., via the internet, are provided. An example of this embodiment is a kit that includes a web address where the instructions can be viewed and/or from which the instructions can be downloaded. As with the instructions, this means for obtaining the instructions is recorded on a suitable substrate.

[0282] In other embodiments, the present invention further provides a kit for identifying a candidate subject for treatment with a composition comprising one or more antisense oligonucleotides, as described herein, and, optionally, a second composition comprising one or more therapeutic or prophylactic agents, and further comprising an evaluator of the gene function of MUC5AC, MUC5B, or both. In some embodiments, the evaluator comprises a DNA sequencing method, as is known in the art. In other embodiments, the evaluator comprises RNA-seq or another RNA sequencing tool to reveal the presence and quantity of RNA in a biological sample. In other embodiments, other methods of evaluating the quantity of downstream MUC5AC, MUC5B DNA, protein, or RNA may be utilized, as are well known in the art. In some embodiments, instructions for use are included in the kit.

[0283] In some embodiments, the present invention provides combined preparations. In some embodiments, “a combined preparation” defines especially a “kit of parts” in the sense that the combination partners as defined above can be dosed independently or by use of different fixed combinations with distinguished amounts of the combination partners i.e., simultaneously, concurrently, separately, or sequentially. In some embodiments, the parts of the kit of parts can then, e.g., be administered simultaneously or chronologically staggered, that is at different time points and with equal or different time intervals for any part of the kit of parts. The ratio of the total amounts of the combination partners, in some embodiments, can be administered in the combined preparation.

[0284] In some embodiments, the components of the kit disclosed above are sterile. In some embodiments, the term “sterile” refers to a state of being free from biological contaminants. Any method of sterilization is applicable and would be apparent to one of ordinary skill in the art.

[0285] In some embodiments, the content of the kit is packaged, to allow for storage of the components until they are needed.

[0286] In some embodiments, the components of the kit are stored in separate containers within the main kit containment element e.g., box or analogous structure, may or may not be an airtight container, e.g., to further preserve the sterility of some or all of the components of the kit.

### Definitions

[0287] The definitions set forth herein take precedence over definitions set forth in any patent, patent application, and/or patent application publication incorporated herein by reference.

[0288] Listed below are definitions of various terms used to describe the present invention. These definitions apply to the terms as they are used throughout the specification (unless they are otherwise limited in specific instances) either individually or as part of a larger group.

[0289] In some embodiments, the terms “a” and “an” refer to “one or more” of the enumerated components. It will be clear to one of ordinary skill in the art that the use of the singular includes the plural unless specifically stated otherwise. Therefore, the terms “a,” “an” and “at least one” are used interchangeably in this application.

[0290] In some embodiments, the term “administering” refers to bringing in contact with a compound of the present invention. In some embodiments, the compositions are applied locally. In other embodiments, the compositions are applied systemically. Administration can be accomplished to cells or tissue cultures, or to living organisms, for example humans.

[0291] In some embodiments, the terms “administering,” “administer,” or “administration” refer to deliver one or more compounds or compositions to a subject parenterally, enterally, or topically. Illustrative examples of parenteral administration include, but are not limited to, intravenous, intramuscular, intraarterial, intrathecal, intracapsular, intraorbital, intracardiac, intradermal, intraperitoneal, transtracheal, subcutaneous, subcuticular, intraarticulare, subcapsular, subarachnoid, intraspinal and intrasternal injection and infusion. Illustrative examples of enteral administration include, but are not limited to oral, inhalation, intrapulmonary, intranasal, sublingual, and rectal administration. Illustrative examples of topical administration include, but are not limited to, transdermal and vaginal administration. In particular embodiments, an agent or composition is administered parenterally, optionally by intravenous administration or oral administration to a subject.

[0292] In some embodiments, a composition of the present invention comprises a pharmaceutically acceptable composition. In some embodiments, the phrase “pharmaceutically acceptable” is employed herein to refer to those compounds, materials, compositions, combinations, and/or dosage forms which are, within the scope of sound medical judgment, suitable for use in contact with the tissues of human beings and animals without excessive toxicity, irritation, allergic response, or other problem or complication, commensurate with a reasonable benefit/risk ratio.

[0293] In some embodiments, a composition or combination of the present invention is administered in a therapeutically effective amount. In some embodiments, a “therapeutically effective amount” is intended to include an amount of a compound of the present invention alone or an amount of the combination of compounds claimed or an amount of a compound of the present invention in combination with other active ingredients effective to decrease MUC5AC, MUC5B, or both MUC5AC and MUC5B, to reduce mucus production, to reduce mucus level, to treat or inhibit a lung disease or disorder, to treat or inhibit chronic obstructive pulmonary disease, asthma, Primary Ciliary Dyskinesia, Cystic Fibrosis, idiopathic pulmonary fibrosis, bronchiectasis, chronic rhinosinusitis (CRS), diffuse panbronchiolitis (DPB), or lung cancer, or a combination thereof. In some embodiments, a “therapeutically effective amount” of a composition of the invention is that amount of composition which is sufficient to provide a beneficial effect to the subject to which the composition is administered.

[0294] In some embodiments, “treating” or “treatment” cover the treatment of a disease-state in a mammal, particularly in a human, and include: (a) preventing the disease-state from occurring in a mammal, in particular, when such mammal is predisposed to the disease-state but has not yet been diagnosed as having it; (b) inhibiting the disease-state, i.e., arresting its development; and/or (c) relieving the disease-state, i.e., causing regression of the disease state.

[0295] In other embodiments, the terms “treatment” or “treating” of a disease, disorder, or condition encompasses alleviation of at least one symptom of the disease, disorder, or condition. In other embodiments, treatment comprises a reduction in the severity of the disease, disorder, or condition. In other embodiments, treatment comprises inhibition of the progression of the disease, disorder, or condition. In some embodiments, treatment need not mean that the disease, disorder, or condition is completely cured. In some embodiments, to be an effective treatment, a composition as described herein need only reduce the severity of a disease, disorder, or condition, reduce the severity of symptoms associated therewith, or provide improvement to a patient or subject's quality of life.

[0296] In other embodiments, “treating” refers to therapeutic treatment and, in other embodiments, prophylactic or preventative measures. In some embodiments, the goal of treating is to prevent or lessen the targeted pathologic condition or disorder as described hereinabove. Thus, in some embodiments, treating may include directly affecting or curing, suppressing, inhibiting, preventing, reducing the severity of, delaying the onset of, reducing symptoms associated with the disease, disorder or condition, or a combination thereof. Thus, in some embodiments, “treating” refers inter alia to delaying progression, expediting remission, inducing remission, augmenting remission, speeding recovery, increasing efficacy of or decreasing resistance to alternative therapeutics, or a combination thereof. In some embodiments, “preventing” refers, inter alia, to delaying the onset of symptoms, preventing relapse to a disease, decreasing the number or frequency of relapse episodes, increasing latency between symptomatic episodes, or a combination thereof. In some embodiments, “suppressing” or “inhibiting”, refers inter alia to reducing the severity of symptoms, reducing the severity of an acute episode, reducing the number of symptoms, reducing the incidence of disease-related symptoms, reducing the latency of symptoms, ameliorating symptoms, reducing secondary symptoms, reducing secondary infections, prolonging subject survival, or a combination thereof.

[0297] In some embodiments, the term “condition” includes anatomic and physiological deviations from the normal anatomic and physiological states which constitute an impairment of the normal state of the living subject or one of its parts and/or that interrupts or modifies the performance of the bodily functions of the subject.

[0298] In some embodiments, the terms “subject” or “individual” or “animal” or “patient” or “mammal,” refers to any subject. In one embodiment, the subject is a mammal. In one embodiment, the subject is a human. In other embodiments, the subject is a primate, which in some embodiments, is a non-human primate. In other embodiments, the subject is murine, which in some embodiments is a mouse, and, in other embodiments is a rat. In other embodiments, the subject is canine, feline, bovine, equine, caprine, ovine, porcine, simian, ursine, vulpine, or lupine. In some embodiments, the subject is a chicken or fish.

[0299] In some embodiments, the subject is male. In other embodiments, the subject is female.

[0300] In some embodiments, the subject is a child. In other embodiments, the subject is an infant. In other embodiments, the subject is an adolescent. In other embodiments, the subject is an adult. In some embodiments, the adult subject is age 50 or older. In other embodiments, the adult subject is age 65 or older. In other embodiments, the adult subject is age 75 or older.

[0301] In some embodiments, “antisense compound” or “antisense oligonucleotide” as used herein refers to a compound comprising or consisting of an oligonucleotide at least a portion of which is complementary to a target nucleic acid to which it is capable of hybridizing, resulting in at least one antisense activity.

[0302] In some embodiments, “oligonucleotide” as used herein refers to a compound comprising a plurality of linked nucleosides. In certain embodiments, an oligonucleotide comprises one or more unmodified ribonucleosides (RNA) and/or unmodified deoxyribonucleosides (DNA) and/or one or more modified nucleosides.

[0303] In some embodiments, “nucleoside” as used herein means a compound comprising a nucleobase moiety and a sugar moiety. Nucleosides include, but are not limited to, naturally occurring nucleosides (as found in DNA and RNA) and modified nucleosides. Nucleosides may be linked to a phosphate moiety.

[0304] In some embodiments, “oligonucleoside” as used herein refers to an oligonucleotide in which none of the internucleoside linkages contains a phosphorus atom. As used herein, oligonucleotides include oligonucleosides.

[0305] In some embodiments, “complementary” refers to the capacity for precise base pairing between two nucleotides. For example, if a nucleotide at a certain position of an oligonucleotide is capable of hydrogen bonding with a nucleotide at the same position of a target nucleic acid as described herein, then the oligonucleotide and the target nucleic acid are considered to be complementary to each other at that position. An oligonucleotide and target nucleic acid are complementary to each other when a sufficient number of corresponding positions in each molecule are occupied by nucleotides that can hydrogen bond with each other through their bases. In other embodiments, the term “complementary” may be used to indicate a sufficient degree of complementarity or precise base pairing such that stable and specific binding occurs between the oligonucleotide and a target nucleic acid (e.g., between an antisense oligonucleotide and an mRNA). Thus, it should be appreciated 100% complementarity is not required for an oligonucleotide to be consider complementary to a target nucleic acid, provided that a sufficient degree of complementarity or precise base pairing exist to achieve stable and specific binding between the oligonucleotide and target nucleic acid. “Fully complementary” or “100% complementary” means each nucleobase of a first nucleic acid has a complementary nucleobase in a second nucleic acid. In some embodiments, a first nucleic acid is an antisense oligonucleotide and a second nucleic acid is a target nucleic acid.

[0306] In some embodiments, a “vector” is includes, inter alia, any viral vector, as well as any plasmid, cosmid, phage or binary vector in double or single stranded linear or circular form that may or may not be self transmissible or mobilizable, and that can transform prokaryotic or eukaryotic host either by integration into the cellular genome or exist extrachromosomally (e.g., autonomous replicating plasmid with an origin of replication).

[0307] In some embodiments, an “expression cassette” as used herein describes a nucleic acid sequence capable of directing expression of a particular nucleotide sequence in an appropriate host cell, which may include a promoter operably linked to the nucleotide sequence of interest that may be operably linked to termination signals. The coding region usually codes for a functional RNA of interest. The expression cassette including the nucleotide sequence of interest may be chimeric. The expression cassette may also be one that is naturally occurring but has been obtained in a recombinant form useful for heterologous expression. The expression of the nucleotide sequence in the expression cassette may be under the control of a constitutive promoter or of a regulatable promoter that initiates transcription only when the host cell is exposed to some particular stimulus. In the case of a multicellular organism, the promoter can also be specific to a particular tissue or organ or stage of development.

[0308] Such expression cassettes can include a transcriptional initiation region linked to a nucleotide sequence of interest. Such an expression cassette is provided with a plurality of restriction sites for insertion of the gene of interest to be under the transcriptional regulation of the regulatory regions. The expression cassette may additionally contain selectable marker genes.

[0309] In some embodiments, the compositions as described herein comprise one or more antisense oligonucleotides as described herein. In other embodiments, the compositions as described herein consist of one or more antisense oligonucleotides as described herein. In other embodiments, the compositions as described herein consist essentially of one or more antisense oligonucleotides as described herein.

[0310] In the description and claims of the present application, each of the verbs, “comprise”, “include” and “have” and conjugates thereof, are used to indicate that the object or objects of the verb are not necessarily a complete listing of components, elements or parts of the subject or subjects of the verb.

[0311] As used herein, the term “consists essentially of”, or variations such as “consist essentially of” or “consisting essentially of”, as used throughout the specification and claims, indicate the inclusion of any recited component or group of components, and the optional inclusion of any recited component or group of integers that do not materially change the basic or novel properties of the specified method, structure, or composition.

[0312] It is to be understood that the compositions, combinations and methods of the present invention comprising the elements or steps as described herein may, in other embodiments, consist of those elements or steps, or in other embodiments, consist essentially of those elements or steps. In some embodiments, the term “comprise” refers to the inclusion of the indicated active agents, such as the antisense oligonucleotide, as well as inclusion of other active agents, and pharmaceutically or physiologically acceptable carriers, excipients, emollients, stabilizers, etc., as are known in the pharmaceutical industry. In some embodiments, the term “consisting essentially of” refers to a composition, whose only active ingredients are the indicated active ingredients. However, other compounds may be included which are for stabilizing, preserving, etc. the formulation, but are not involved directly in the therapeutic effect of the indicated active ingredients. In some embodiments, the term “consisting essentially of” may refer to components which facilitate the release of the active ingredient. In some embodiments, the term “consisting” refers to a composition, which contains the active ingredients and a pharmaceutically acceptable carrier or excipient.

[0313] In the discussion unless otherwise stated, adjectives such as “substantially” and “about” modifying a condition or relationship characteristic of a feature or features of an embodiment of the invention, are understood to mean that the condition or characteristic is defined to within tolerances that are acceptable for operation of the embodiment for an application for which it is intended. Unless otherwise indicated, the word “of” in the specification and claims is considered to be the inclusive “or” rather than the exclusive or, and indicates at least one of, or any combination of items it conjoins.

[0314] For purposes of better understanding the present teachings and in no way limiting the scope of the teachings, unless otherwise indicated, all numbers expressing quantities, percentages or proportions, and other numerical values used in the specification and claims, are to be understood as being modified in all instances by the term “about”. Accordingly, unless indicated to the contrary, the numerical parameters set forth in the following specification and attached claims are approximations that may vary depending upon the desired properties sought to be obtained. At the very least, each numerical parameter should at least be construed in light of the number of reported significant digits and by applying ordinary rounding techniques.

[0315] It is to be understood that the sequence set forth in each SEQ ID NO contained herein is independent of any nucleoside analogues or any modification to a sugar moiety, an internucleoside linkage, or a nucleobase. As such, compounds defined by a SEQ ID NO may comprise, independently, one or more nucleoside analogues or modifications to a sugar moiety, an internucleoside linkage, or a nucleoside. Moreover, the nucleotides T and U are used interchangeably in sequence descriptions.

[0316] Other terms as used herein are meant to be defined by their well-known meanings in the art.

[0317] It is appreciated that certain features of the invention, which are, for clarity, described in the context of separate embodiments, may also be provided in combination in a single embodiment. Conversely, various features of the invention, which are, for brevity, described in the context of a single embodiment, may also be provided separately or in any suitable sub-combination or as suitable in any other described embodiment of the invention. Certain features described in the context of various embodiments are not to be considered essential features of those embodiments unless the embodiment is inoperative without those elements.

[0318] While certain features of the invention have been illustrated and described herein, many modifications, substitutions, changes, and equivalents will now occur to those of ordinary skill in the art. It is, therefore, to be understood that the appended claims are intended to cover all such modifications and changes as fall within the true spirit of the invention.

### EXAMPLES

### Materials and Methods

### Oligonucleotide Synthesis

[0319] 2MOE modified oligonucleotides on a phosphorothioate backbone were synthesized using methods well known in the art. The oligonucleotides as described in Table 1 were synthesized and used in subsequent experiments.

### 549 Cell Line

[0320] A549 lung epithelial cells line, which express MUC5AC and MUC5B endogenously were used to analyze the ability of the antisense oligonucleotides to induce exon skipping and MUC5AC RNA degradation.

### Transfection

[0321] A549 cells were plated onto 6-well plates with 180,000 cells per well with 10% FCS DMEM and left overnight prior to transfection. Each antisense oligonucleotide as described herein was transfected into the cells using Lipofecatmine 2000 transfection reagent (Invitrogen) according to the lipofectamine 2000 reagent protocol. In each experiment, the effect of treatment with the ASOs on MUC5AC and MUC5B RNA levels was analyzed in comparison to treatment with a control antisense oligonucleotide.

### RNA Extraction

[0322] Twenty-four (24) hr following transfection, total RNA was extracted using RNeasy Mini Kit (QIAGEN). RNA concentration was determined using a nanodrop. Complementary DNA (cDNA) synthesis was performed using the High-Capacity cDNA Reverse Transcription Kit (Applied Biosystems). The cDNA was analyzed by PCR and qPCR.

Quantitative Detection MUC5AC and MUC5B Transcripts (qPCR)

[0323] Real-time PCR was performed in QuantStudio 3 Real-Time PCR System using TaqMan® Fast Advanced Master Mix (Applied Biosystems) with TaqMan probes specific for transcripts with or without the exon of interest. The expression level was normalized to the transcript levels of GAPDH. Technical duplicates were analyzed for each sample. Analysis was performed using the double delta Ct analysis.

### PCR

[0324] PCR was performed using the Platinum™ SuperFi™ Master Mix (Invitrogen). PCR products were then separated on an agarose gel for detection of the MUC5AC and MUC5B transcripts. The gels were exposed to UV light for visualization, and the PCR products were recorded.

### Primary Bronchial and Nasal Epithelial Cell Culture.

[0325] HNE and HBE cells were thawed for expansion by growing the cells in PneumaCult™-Ex Plus Medium for one passage. After expansion, cells were seeded on porous filters (Transwell Permeable Supports, 6.5 mm Inserts, 24 well plate, 0.4 μm Polyester Membrane, ref.: 3470, Corning Incorporated). One day later, cells were converted to Air-liquid conditions. After amplification, once the filters stopped leaking from the basal to the apical side, the basal medium was switched to PneumaCult™-ALI Maintenance Medium, and the cells differentiated in air liquid interface culture for 5 weeks. Cells were allowed to accumulate mucus for two weeks before experimentation. Once a week, starting 2 weeks after seeding, mucus was cleaned by incubating the cells with KREBS solution up to 3 hours. HNEs were treated for one or two weeks and HBEs were treated for two weeks with 20 μM ASO with and without ing/ml or 10 ng/ml cytokine treatment from the basal side once in two days during ALI medium exchange. Cytokines were added 2 days prior to ASO administration and every time the ASO was added.

### Example 1

TABLE 1
Selected oligonucleotides

| | | | SEQ | | SEQ |
|---|---|---|---|---|---|
| | Target 5′-3′ | length | ID NO: | ASO sequence 5′->3′ | ID NO: |
| SPL5AC1 | TGCCTTCCTCC | 18 | 108 | ACCCUGUGGAGGA | 1 |
| | ACAGGGT | | | AGGCA | |
| SPL5AC2 | TTCCTCCACAG | 18 | 109 | CAGGACCCUGUGG | 2 |
| | GGTCCTG | | | AGGAA | |
| SPL5AC3 | AGCCAGTCTG | 20 | 110 | AUGAGGACCCCAG | 3 |
| | GGGTCCTCAT | | | ACUGGCU | |
| SPL5AC4 | AGCCAGTCTG | 21 | 111 | AAUGAGGACCCCA | 4 |
| | GGGTCCTCATT | | | GACUGGCU | |
| SPL5AC5 | CCAGTCTGGG | 18 | 112 | AUGAGGACCCCAG | 5 |
| | GTCCTCAT | | | ACUGG | |
| SPL5AC6 | CAGTCTGGGG | 18 | 113 | AAUGAGGACCCCA | 6 |
| | TCCTCATT | | | GACUG | |
| SPL5AC7 | CCAGTCTGGG | 19 | 114 | AAUGAGGACCCCA | 7 |
| | GTCCTCATT | | | GACUGG | |
| SPL5AC8 | GCCAGTCTGG | 20 | 115 | AAUGAGGACCCCA | 8 |
| | GGTCCTCATT | | | GACUGGC | |
| SPL5AC9 | ACCACGATGA | 22 | 116 | ACCAGCAGGCUGU | 9 |
| | CAGCCTGCTG | | | CAUCGUGGU | |
| | GT | | | | |
| SPL5AC10 | ATGACAGCCT | 18 | 117 | UCACCAGCAGGCU | 10 |
| | GCTGGTGA | | | GUCAU | |
| SPL5AC11 | CTGTCCACAG | 19 | 118 | CAUACUUCUCUGU | 11 |
| | AGAAGTATG | | | GGACAG | |
| SPL5AC12 | CACAGAGAAG | 19 | 119 | CUGAGCAUACUUC | 12 |
| | TATGCTCAG | | | UCUGUG | |
| SPL5AC13 | AGAGAAGTAT | 19 | 120 | GUGCUGAGCAUAC | 13 |
| | GCTCAGCAC | | | UUCUCU | |
| SPL5AC14 | AAGTATGCTC | 18 | 121 | CCAGUGCUGAGCA | 14 |
| | AGCACTGG | | | UACUU | |
| SPL5AC15 | AAGTATGCTC | 19 | 122 | ACCAGUGCUGAGC | 15 |
| | AGCACTGGT | | | AUACUU | |
| SPL5AC16 | AGTATGCTCA | 18 | 123 | ACCAGUGCUGAGC | 16 |
| | GCACTGGT | | | AUACU | |
| SPL5AC17 | GTATGCTCAG | 18 | 124 | CACCAGUGCUGAG | 17 |
| | CACTGGTG | | | CAUAC | |
| SPL5AC18 | AGTATGCTCA | 19 | 125 | CACCAGUGCUGAG | 18 |
| | GCACTGGTG | | | CAUACU | |
| SPL5AC19 | AAGTATGCTC | 20 | 126 | CACCAGUGCUGAG | 19 |
| | AGCACTGGTG | | | CAUACUU | |
| SPL5AC20 | GGAACCTACT | 20 | 127 | GUUACCGAGUAGU | 20 |
| | ACTCGGTAAC | | | AGGUUCC | |
| SPL5AC21 | CCTACTACTCG | 19 | 128 | GAUGUUACCGAGU | 21 |
| | GTAACATC | | | AGUAGG | |
| SPL5AC22 | ACTACTCGGT | 19 | 129 | GCAGAUGUUACCG | 22 |
| | AACATCTGC | | | AGUAGU | |
| SPL5AC23 | TCGGTAACAT | 19 | 130 | AGGCGGCAGAUGU | 23 |
| | CTGCCGCCT | | | UACCGA | |
| SPL5AC24 | AGGTGGAGCC | 22 | 131 | UAGUACCUGGCCG | 24 |
| | GGCCAGGTAC | | | GCUCCACCU | |
| | TA | | | | |
| SPL5AC25 | CCAGGCCTGC | 18 | 132 | ACUUCAUGGCAGG | 25 |
| | CATGAAGT | | | CCUGG | |
| SPL5AC26 | GAGCATCTGC | 18 | 133 | CACUCACGGCAGA | 26 |
| | CGTGAGTG | | | UGCUC | |
| SPL5AC27 | ATCTGCCGTG | 19 | 134 | ACUCGCACUCACG | 27 |
| | AGTGCGAGT | | | GCAGAU | |
| SPL5AC28 | AGCATCTGCC | 20 | 135 | UCGCACUCACGGC | 28 |
| | GTGAGTGCGA | | | AGAUGCU | |
| SPL5B1 | AGCACCTGCA | 19 | 136 | UCCGGUUCCUGCA | 29 |
| | GGAACCGGA | | | GGUGCU | |
| SPL5B2 | CTACGGGGAT | 18 | 137 | AAGUGGCCAUCCC | 30 |
| | GGCCACTT | | | CGUAG | |
| SPL5B4 | CAGGTTGACT | 19 | 138 | ACUUGGUGGAGUC | 31 |
| | CCACCAAGT | | | AACCUG | |
| SPL5B5 | GGTTGACTCC | 19 | 139 | GUACUUGGUGGAG | 32 |
| | ACCAAGTAC | | | UCAACC | |
| SPL5B6 | ACTGCGAGTG | 18 | 140 | UGCAGAAACACUC | 33 |
| | TTTCTGCA | | | GCAGU | |
| SPL5B7 | GACTGCGAGT | 19 | 141 | UGCAGAAACACUC | 34 |
| | GTTTCTGCA | | | GCAGUC | |
| SPL5B8 | ACTGCGAGTG | 19 | 142 | GUGCAGAAACACU | 35 |
| | TTTCTGCAC | | | CGCAGU | |
| SPL5B9 | GACTGCGAGT | 20 | 143 | GUGCAGAAACACU | 36 |
| | GTTTCTGCAC | | | CGCAGUC | |
| SPL5B10 | GACTGCGAGT | 18 | 144 | GCAGAAACACUCG | 37 |
| | GTTTCTGC | | | CAGUC | |
| SPL5B11 | CTGCGAGTGT | 18 | 145 | GUGCAGAAACACU | 38 |
| | TTCTGCAC | | | CGCAG | |
| SPL5B12 | ACACCTGCCG | 18 | 146 | CCGACUCACGGCA | 39 |
| | TGAGTCGG | | | GGUGU | |
| SPL5B13 | CCTTCTTCAAT | 19 | 147 | UGGUCCUCAUUGA | 40 |
| | GAGGACCA | | | AGAAGG | |
| SPL5B14 | TTCTTCAATGA | 21 | 148 | CAUCUGGUCCUCA | 41 |
| | GGACCAGATG | | | UUGAAGAA | |
| SPL5B15 | CTTCAATGAG | 19 | 149 | CAUCUGGUCCUCA | 42 |
| | GACCAGATG | | | UUGAAG | |
| SPL5B16 | TCAATGAGGA | 20 | 150 | CUUCAUCUGGUCC | 43 |
| | CCAGATGAAG | | | UCAUUGA | |
| SPL5B17 | CAATGAGGAC | 20 | 151 | ACUUCAUCUGGUC | 44 |
| | CAGATGAAGT | | | CUCAUUG | |
| SPL5B18 | TGAGGACCAG | 18 | 152 | CACUUCAUCUGGU | 45 |
| | ATGAAGTG | | | CCUCA | |
| SPL5B19 | CCAGTGTGGC | 18 | 153 | UCGUAGCAGCCAC | 46 |
| | TGCTACGA | | | ACUGG | |
| SPL5B20 | ACTGCCAGAG | 18 | 154 | CUCACCAGCUCUG | 47 |
| | CTGGTGAG | | | GCAGU | |
| SPL5B21 | GAACTGCCAG | 19 | 155 | UCACCAGCUCUGG | 48 |
| | AGCTGGTGA | | | CAGUUC | |
| SPL5B22 | GGAGAACTGC | 20 | 156 | ACCAGCUCUGGCA | 49 |
| | CAGAGCTGGT | | | GUUCUCC | |
| SPL5B23 | CTGCCAGAGC | 18 | 157 | CCUCACCAGCUCU | 50 |
| | TGGTGAGG | | | GGCAG | |
| SPL5B24 | AGAGCTGGTG | 22 | 158 | UUCCCACCCCCUC | 51 |
| | AGGGGGTGGG | | | ACCAGCUCU | |
| | AA | | | | |
| SPL5B25 | TGGTGAGGGG | 18 | 159 | CUUCCCACCCCCU | 52 |
| | GTGGGAAG | | | CACCA | |
| SPL5AC5-1 | CTTCAGCCAG | 18 | 160 | ACCCCAGACUGGC | 53 |
| | TCTGGGGT | | | UGAAG | |
| SPL5AC5-2 | TTCAGCCAGT | 20 | 161 | AGGACCCCAGACU | 54 |
| | CTGGGGTCCT | | | GGCUGAA | |
| SPL5AC5-3 | CAGCCAGTCT | 22 | 162 | AAUGAGGACCCCA | 55 |
| | GGGGTCCTCA | | | GACUGGCUG | |
| | TT | | | | |
| SPL5AC5-4 | CCAGTCTGGG | 21 | 163 | UGAAUGAGGACCC | 56 |
| | GTCCTCATTCA | | | CAGACUGG | |
| SPL5AC5-5 | AGTCTGGGGT | 19 | 164 | UGAAUGAGGACCC | 57 |
| | CCTCATTCA | | | CAGACU | |
| SPL5AC5-6 | TCTGGGGTCCT | 18 | 165 | CUGAAUGAGGACC | 58 |
| | CATTCAG | | | CCAGA | |
| SPL5AC5-7 | TGGGGTCCTC | 20 | 166 | UCUGCUGAAUGAG | 59 |
| | ATTCAGCAGA | | | GACCCCA | |
| SPL5AC5-8 | GGTCCTCATTC | 18 | 167 | CUCUGCUGAAUGA | 60 |
| | AGCAGAG | | | GGACC | |
| SPL5AC5-9 | TCCTCATTCAG | 19 | 168 | CUGCUCUGCUGAA | 61 |
| | CAGAGCAG | | | UGAGGA | |
| SPL5AC5-10 | TCATTCAGCA | 19 | 169 | CUGCUGCUCUGCU | 62 |
| | GAGCAGCAG | | | GAAUGA | |
| SPL5AC5-11 | ATTCAGCAGA | 20 | 170 | UAGCUGCUGCUCU | 63 |
| | GCAGCAGCTA | | | GCUGAAU | |
| SPL5AC5-12 | ATTCAGCAGA | 19 | 171 | AGCUGCUGCUCUG | 64 |
| | GCAGCAGCT | | | CUGAAU | |
| SPL5AC5-13 | TCAGCAGAGC | 18 | 172 | UAGCUGCUGCUCU | 65 |
| | AGCAGCTA | | | GCUGA | |
| SPL5AC5-14 | AGCAGAGCAG | 18 | 173 | UGUAGCUGCUGCU | 66 |
| | CAGCTACA | | | CUGCU | |
| SPL5AC5-15 | AGAGCAGCAG | 19 | 174 | UUGGUGUAGCUGC | 67 |
| | CTACACCAA | | | UGCUCU | |
| SPL5AC5-16 | AGCAGCAGCT | 18 | 175 | CUUGGUGUAGCUG | 68 |
| | ACACCAAG | | | CUGCU | |
| SPL5AC5-17 | AGCAGCTACA | 18 | 176 | CACCUUGGUGUAG | 69 |
| | CCAAGGTG | | | CUGCU | |
| SPL5AC5-18 | AGCTACACCA | 18 | 177 | CUCCACCUUGGUG | 70 |
| | AGGTGGAG | | | UAGCU | |
| SPL5AC5-19 | TACACCAAGG | 19 | 178 | UGGCCUCCACCUU | 71 |
| | TGGAGGCCA | | | GGUGUA | |
| SPL5AC5-20 | AGGCTGGGCC | 20 | 179 | AUGAGGACAAGGC | 72 |
| | TTGTCCTCAT | | | CCAGCCU | |
| SPL5AC5-21 | TGGGCCTTGTC | 18 | 180 | ACAUGAGGACAAG | 73 |
| | CTCATGT | | | GCCCA | |
| SPL5AC5-22 | GCCTTGTCCTC | 19 | 181 | UUCCACAUGAGGA | 74 |
| | ATGTGGAA | | | CAAGGC | |
| SPL5AC5-23 | CTTGTCCTCAT | 19 | 182 | GGUUCCACAUGAG | 75 |
| | GTGGAACC | | | GACAAG | |
| SPL5AC5-24 | TGTCCTCATGT | 18 | 183 | UGGUUCCACAUGA | 76 |
| | GGAACCA | | | GGACA | |
| SPL5AC5-25 | TCCTCATGTGG | 18 | 184 | CGUGGUUCCACAU | 77 |
| | AACCACG | | | GAGGA | |
| SPL5AC5-26 | CATGTGGAAC | 19 | 185 | GUCAUCGUGGUUC | 78 |
| | CACGATGAC | | | CACAUG | |
| SPL5AC5-27 | TGTGGAACCA | 18 | 186 | UGUCAUCGUGGUU | 79 |
| | CGATGACA | | | CCACA | |
| SPL5AC5-28 | TGGAACCACG | 18 | 187 | GCUGUCAUCGUGG | 80 |
| | ATGACAGC | | | UUCCA | |
| SPL5AC5-29 | GAACCACGAT | 18 | 188 | AGGCUGUCAUCGU | 81 |
| | GACAGCCT | | | GGUUC | |
| SPL5AC5-30 | ACCACGATGA | 19 | 189 | AGCAGGCUGUCAU | 82 |
| | CAGCCTGCT | | | CGUGGU | |
| SPL5B5-1 | AGGGAGGAGC | 19 | 190 | UGUAAGGCAGCUC | 83 |
| | TGCCTTACA | | | CUCCCU | |
| SPL5B5-2 | GGGAGGAGCT | 18 | 191 | UGUAAGGCAGCUC | 84 |
| | GCCTTACA | | | CUCCC | |
| SPL5B5-3 | GGAGGAGCTG | 18 | 192 | CUGUAAGGCAGCU | 85 |
| | CCTTACAG | | | CCUCC | |
| SPL5B5-4 | CTGCCTTACA | 18 | 193 | AGUGCGGCUGUAA | 86 |
| | GCCGCACT | | | GGCAG | |
| SPL5B5-5 | TGCCTTACAG | 18 | 194 | CAGUGCGGCUGUA | 87 |
| | CCGCACTG | | | AGGCA | |
| SPL5B5-6 | TGGAGCAGAG | 22 | 195 | AUGUAGUCCCCGC | 88 |
| | CGGGGACTAC | | | UCUGCUCCA | |
| | AT | | | | |
| SPL5B5-7 | AGCAGAGCGG | 19 | 196 | AUGUAGUCCCCGC | 89 |
| | GGACTACAT | | | UCUGCU | |
| SPL5B5-8 | AGAGCGGGGA | 19 | 197 | UUGAUGUAGUCCC | 90 |
| | CTACATCAA | | | CGCUCU | |
| SPL5B5-9 | AGCGGGGACT | 18 | 198 | CUUGAUGUAGUCC | 91 |
| | ACATCAAG | | | CCGCU | |
| SPL5B5-10 | GGGGACTACA | 19 | 199 | UGACCUUGAUGUA | 92 |
| | TCAAGGTCA | | | GUCCCC | |
| SPL5B5-11 | GACTACATCA | 18 | 200 | GCUGACCUUGAUG | 93 |
| | AGGTCAGC | | | UAGUC | |
| SPL5B5-12 | TACATCAAGG | 19 | 201 | GGAUGCUGACCUU | 94 |
| | TCAGCATCC | | | GAUGUA | |
| SPL5B5-13 | ATCAAGGTCA | 18 | 202 | CCGGAUGCUGACC | 95 |
| | GCATCCGG | | | UUGAU | |
| SPL5B5-14 | AAGGTCAGCA | 18 | 203 | CAGCCGGAUGCUG | 96 |
| | TCCGGCTG | | | ACCUU | |
| SPL5B5-15 | AGCATCCGGC | 22 | 204 | AUGUCAGCACCAG | 97 |
| | TGGTGCTGAC | | | CCGGAUGCU | |
| | AT | | | | |
| SPL5B5-16 | ATCCGGCTGG | 19 | 205 | AUGUCAGCACCAG | 98 |
| | TGCTGACAT | | | CCGGAU | |
| SPL5B5-17 | GGCTGGTGCT | 19 | 206 | AGGAAUGUCAGCA | 99 |
| | GACATTCCT | | | CCAGCC | |
| SPL5B5-18 | CTGGTGCTGA | 19 | 207 | ACAGGAAUGUCAG | 100 |
| | CATTCCTGT | | | CACCAG | |
| SPL5B5-19 | GTGCTGACAT | 19 | 208 | UCCACAGGAAUGU | 101 |
| | TCCTGTGGA | | | CAGCAC | |
| SPL5B5-20 | CTGACATTCCT | 18 | 209 | GUUCCACAGGAAU | 102 |
| | GTGGAAC | | | GUCAG | |
| SPL5B5-21 | CATTCCTGTGG | 19 | 210 | UCUCCGUUCCACA | 103 |
| | AACGGAGA | | | GGAAUG | |
| SPL5B5-22 | TTCCTGTGGA | 18 | 211 | CUCUCCGUUCCAC | 104 |
| | ACGGAGAG | | | AGGAA | |
| SPL5B5-23 | CTGTGGAACG | 19 | 212 | UGUCCUCUCCGUU | 105 |
| | GAGAGGACA | | | CCACAG | |
| SPL5B5-24 | TGGAACGGAG | 18 | 213 | ACUGUCCUCUCCG | 106 |
| | AGGACAGT | | | UUCCA | |
| SPL5B5-25 | AACGGAGAGG | 18 | 214 | GGCACUGUCCUCU | 107 |
| | ACAGTGCC | | | CCGUU | |

### Example 2

### MUC5AC

[0326] The ASOs that were selected for testing are mapped to their positions relative to Exons 5, 16, or 26 of MUC5AC in FIGS. 1A-1C. The efficacy of the MUC5AC ASOs was examined by RT-PCR (FIGS. 2A-2C) and by RT-qPCR (FIG. 3). Data from RT-PCR experiments demonstrated that 5 ASOs targeting Exon 5 (FIG. 2A) and 2 ASOs targeting Exon 16 (FIG. 2B) of MUC5AC were effective in significantly reducing the level of MUC5AC full length transcripts. The RT-qPCR data confirmed the high efficacy of the flagged ASOs from the RT-PCR experiments (FIG. 3). The most efficient ASO are marked with stripes in FIG. 3. SPL5AC3 was tested in further experiments based on the RT-PCR results. These lead candidates ASOs have no off-target effect on the level of MUC5B transcripts as seen in FIG. 4.

[0327] A walk on MUC5AC exon 5 was performed to identify additional ASO candidates for the reduction of MUC5B RNA levels. These ASOs are mapped to their positions relative to Exons 5 in FIG. 5. RT-PCR experiments provided data demonstrating that at least 6 ASOs significantly reduced the level of MUC5AC full length transcripts (FIGS. 6A-6B).

[0328] The effect of lead candidate ASO was further examined in human primary cells. The RT-PCR (FIG. 7A) and RT-qPCR (FIG. 7B) data show that SPL5AC4 reduces significantly MUC5AC levels in primary Human Nasal Epithelial Cells (HNEs). The ASO was highly efficient in MUC5AC RNA level reduction also following MUC5AC induction by IL-13 as seen in FIGS. 7A-B. SPL5AC4 and SPL5AC8 were also highly efficient in reducing MUC5AC levels, with and without' IL-13 induction, in primary Human Bronchial Epithelial Cells (HBEs) (FIG. 8). These lead candidates ASOs have no off-target effect on the level of MUC5B transcripts in these HBE cells (FIG. 9).

### Example 3

### MUC5B

[0329] The ASOs that were selected for testing are mapped to their positions relative to Exons 22, 26, or 28 of MUC5B in FIGS. 10A-10C. The efficacy of the MUC5B ASOs was examined by RT-PCR (FIGS. 11A-C) and by RT-qPCR (FIG. 12). Data from RT-PCR experiments demonstrated that one ASO targeting Exon 22 and one ASO targeting Exon 26 of MUC5B were effective in significantly reducing the level of MUC5B full length transcripts. The RT-qPCR data confirmed the high efficacy of the flagged ASOs from the RT-PCR experiments for all ASOs (FIG. 12). Also, one additional Exon 26-targeting ASO was added as a lead candidate (FIG. 12, SPL5B8) based on the RT-PCR results. The most efficient ASO are marked with stripes. These lead candidates ASOs have no off-target effect on the level of MUC5B transcripts (FIG. 13).

[0330] A walk on MUC5B exon 5 was performed to identify additional ASO candidates for the reduction of MUC5B RNA levels. These ASOs are mapped to their positions relative to Exons 5 in FIG. 14. RT-PCR experiments provided data demonstrating that at least 7 ASOs significantly reduced the level of MUC5B full length transcripts (FIGS. 15A-B). The RT-qPCR data (FIG. 16) confirmed the significant reduction of the flagged ASOs from the RT-PCR experiments.

[0331] The effect of the SPL5B2 ASO was further examined in primary human Bronchial Epithelial Cells (HBEs). SPL5B2 reduces significantly MUC5B levels in HBEs (FIG. 17).

### Example 3

### Muc5ac and Muc5b RNA Expression Levels in BALB/c Mice

[0332] The lungs from four WT BALB/c mice were crushed and homogenized, RNA was extracted, and Muc5ac and Muc5b RNA expression levels were analyzed. RT-PCR and RT-qPCR showed that both Muc5ac (FIGS. 18A-18B) and Muc5b (FIGS. 18C-18D) are expressed in this strain. The expression levels of Muc5ac and Muc5b was similar among individual BALB/c mice (FIGS. 18A-D).

[0333] Intrathecal treatment of BALB/c mice with 10 mg/kg SPL5AC4 twice a week for 2 weeks led to reduction of Muc5ac levels measured using RT-PCR (FIG. 19).

The application's sequence listing, which the Patent Office published only in electronic form, follows.

SEQUENCE LISTING (2307 sequences)

SEQ ID NO: 1 - RNA, 18 nt, synthetic construct
  variation 1..18: note = Note: the sequence may be DNA or RNA
  misc_feature 1..18: note = Description of sequence: ASO Sequence: MUCIN 5ACExon 5SPL5AC1
  source 1..18: mol_type = other RNA
accctgtggaggaaggca

SEQ ID NO: 2 - RNA, 18 nt, synthetic construct
  variation 1..18: note = Note: the sequence may be DNA or RNA
  misc_feature 1..18: note = Description of sequence: ASO Sequence: MUCIN 5ACExon 5SPL5AC2
  source 1..18: mol_type = other RNA
caggaccctgtggaggaa

SEQ ID NO: 3 - RNA, 20 nt, synthetic construct
  variation 1..20: note = Note: the sequence may be DNA or RNA
  misc_feature 1..20: note = Description of sequence: ASO Sequence: MUCIN 5ACExon 5SPL5AC3
  source 1..20: mol_type = other RNA
atgaggaccccagactggct

SEQ ID NO: 4 - RNA, 21 nt, synthetic construct
  variation 1..21: note = Note: the sequence may be DNA or RNA
  misc_feature 1..21: note = Description of sequence: ASO Sequence: MUCIN 5ACExon 5SPL5AC4
  source 1..21: mol_type = other RNA
aatgaggaccccagactggct

SEQ ID NO: 5 - RNA, 18 nt, synthetic construct
  variation 1..18: note = Note: the sequence may be DNA or RNA
  misc_feature 1..18: note = Description of sequence: ASO Sequence: MUCIN 5ACExon 5SPL5AC5
  source 1..18: mol_type = other RNA
atgaggaccccagactgg

SEQ ID NO: 6 - RNA, 18 nt, synthetic construct
  variation 1..18: note = Note: the sequence may be DNA or RNA
  misc_feature 1..18: note = Description of sequence: ASO Sequence: MUCIN 5ACExon 5SPL5AC6
  source 1..18: mol_type = other RNA
aatgaggaccccagactg

SEQ ID NO: 7 - RNA, 19 nt, synthetic construct
  variation 1..19: note = Note: the sequence may be DNA or RNA
  misc_feature 1..19: note = Description of sequence: ASO Sequence: MUCIN 5ACExon 5SPL5AC7
  source 1..19: mol_type = other RNA
aatgaggaccccagactgg

SEQ ID NO: 8 - RNA, 20 nt, synthetic construct
  variation 1..20: note = Note: the sequence may be DNA or RNA
  misc_feature 1..20: note = Description of sequence: ASO Sequence: MUCIN 5ACExon 5SPL5AC8
  source 1..20: mol_type = other RNA
aatgaggaccccagactggc

SEQ ID NO: 9 - RNA, 22 nt, synthetic construct
  variation 1..22: note = Note: the sequence may be DNA or RNA
  misc_feature 1..22: note = Description of sequence: ASO Sequence: MUCIN 5ACExon 5SPL5AC9
  source 1..22: mol_type = other RNA
accagcaggctgtcatcgtggt

SEQ ID NO: 10 - RNA, 18 nt, synthetic construct
  variation 1..18: note = Note: the sequence may be DNA or RNA
  misc_feature 1..18: note = Description of sequence: ASO Sequence: MUCIN 5ACExon 5SPL5AC10
  source 1..18: mol_type = other RNA
tcaccagcaggctgtcat

SEQ ID NO: 11 - RNA, 19 nt, synthetic construct
  variation 1..19: note = Note: the sequence may be DNA or RNA
  misc_feature 1..19: note = Description of sequence: ASO Sequence: MUCIN 5ACExon 16SPL5AC11
  source 1..19: mol_type = other RNA
catacttctctgtggacag

SEQ ID NO: 12 - RNA, 19 nt, synthetic construct
  variation 1..19: note = Note: the sequence may be DNA or RNA
  misc_feature 1..19: note = Description of sequence: ASO Sequence: MUCIN 5ACExon 16SPL5AC12
  source 1..19: mol_type = other RNA
ctgagcatacttctctgtg

SEQ ID NO: 13 - RNA, 19 nt, synthetic construct
  variation 1..19: note = Note: the sequence may be DNA or RNA
  misc_feature 1..19: note = Description of sequence: ASO Sequence: MUCIN 5ACExon 16SPL5AC13
  source 1..19: mol_type = other RNA
gtgctgagcatacttctct

SEQ ID NO: 14 - RNA, 18 nt, synthetic construct
  variation 1..18: note = Note: the sequence may be DNA or RNA
  misc_feature 1..18: note = Description of sequence: ASO Sequence: MUCIN 5ACExon 16SPL5AC14
  source 1..18: mol_type = other RNA
ccagtgctgagcatactt

SEQ ID NO: 15 - RNA, 19 nt, synthetic construct
  variation 1..19: note = Note: the sequence may be DNA or RNA
  misc_feature 1..19: note = Description of sequence: ASO Sequence: MUCIN 5ACExon 16SPL5AC15
  source 1..19: mol_type = other RNA
accagtgctgagcatactt

SEQ ID NO: 16 - RNA, 18 nt, synthetic construct
  variation 1..18: note = Note: the sequence may be DNA or RNA
  misc_feature 1..18: note = Description of sequence: ASO Sequence: MUCIN 5ACExon 16SPL5AC16
  source 1..18: mol_type = other RNA
accagtgctgagcatact

SEQ ID NO: 17 - RNA, 18 nt, synthetic construct
  variation 1..18: note = Note: the sequence may be DNA or RNA
  misc_feature 1..18: note = Description of sequence: ASO Sequence: MUCIN 5ACExon 16SPL5AC17
  source 1..18: mol_type = other RNA
caccagtgctgagcatac

SEQ ID NO: 18 - RNA, 19 nt, synthetic construct
  variation 1..19: note = Note: the sequence may be DNA or RNA
  misc_feature 1..19: note = Description of sequence: ASO Sequence: MUCIN 5ACExon 16SPL5AC18
  source 1..19: mol_type = other RNA
caccagtgctgagcatact

SEQ ID NO: 19 - RNA, 20 nt, synthetic construct
  variation 1..20: note = Note: the sequence may be DNA or RNA
  misc_feature 1..20: note = Description of sequence: ASO Sequence: MUCIN 5ACExon 16SPL5AC19
  source 1..20: mol_type = other RNA
caccagtgctgagcatactt

SEQ ID NO: 20 - RNA, 20 nt, synthetic construct
  variation 1..20: note = Note: the sequence may be DNA or RNA
  misc_feature 1..20: note = Description of sequence: ASO Sequence: MUCIN 5ACExon 16SPL5AC20
  source 1..20: mol_type = other RNA
gttaccgagtagtaggttcc

SEQ ID NO: 21 - RNA, 19 nt, synthetic construct
  variation 1..19: note = Note: the sequence may be DNA or RNA
  misc_feature 1..19: note = Description of sequence: ASO Sequence: MUCIN 5ACExon 16SPL5AC21
  source 1..19: mol_type = other RNA
gatgttaccgagtagtagg

SEQ ID NO: 22 - RNA, 19 nt, synthetic construct
  variation 1..19: note = Note: the sequence may be DNA or RNA
  misc_feature 1..19: note = Description of sequence: ASO Sequence: MUCIN 5ACExon 16SPL5AC22
  source 1..19: mol_type = other RNA
gcagatgttaccgagtagt

SEQ ID NO: 23 - RNA, 19 nt, synthetic construct
  variation 1..19: note = Note: the sequence may be DNA or RNA
  misc_feature 1..19: note = Description of sequence: ASO Sequence: MUCIN 5ACExon 16SPL5AC23
  source 1..19: mol_type = other RNA
aggcggcagatgttaccga

SEQ ID NO: 24 - RNA, 22 nt, synthetic construct
  variation 1..22: note = Note: the sequence may be DNA or RNA
  misc_feature 1..22: note = Description of sequence: ASO Sequence: MUCIN 5ACExon26SPL5AC24
  source 1..22: mol_type = other RNA
tagtacctggccggctccacct

SEQ ID NO: 25 - RNA, 18 nt, synthetic construct
  variation 1..18: note = Note: the sequence may be DNA or RNA
  misc_feature 1..18: note = Description of sequence: ASO Sequence: MUCIN 5ACExon26SPL5AC25
  source 1..18: mol_type = other RNA
acttcatggcaggcctgg

SEQ ID NO: 26 - RNA, 18 nt, synthetic construct
  variation 1..18: note = Note: the sequence may be DNA or RNA
  misc_feature 1..18: note = Description of sequence: ASO Sequence: MUCIN 5ACExon26SPL5AC26
  source 1..18: mol_type = other RNA
cactcacggcagatgctc

SEQ ID NO: 27 - RNA, 19 nt, synthetic construct
  variation 1..19: note = Note: the sequence may be DNA or RNA
  misc_feature 1..19: note = Description of sequence: ASO Sequence: MUCIN 5ACExon26SPL5AC27
  source 1..19: mol_type = other RNA
actcgcactcacggcagat

SEQ ID NO: 28 - RNA, 20 nt, synthetic construct
  variation 1..20: note = Note: the sequence may be DNA or RNA
  misc_feature 1..20: note = Description of sequence: ASO Sequence: MUCIN 5ACExon26SPL5AC28
  source 1..20: mol_type = other RNA
tcgcactcacggcagatgct

SEQ ID NO: 29 - RNA, 19 nt, synthetic construct
  variation 1..19: note = Note: the sequence may be DNA or RNA
  misc_feature 1..19: note = Description of sequence: ASO Sequence: MUCIN 5BExon22SPL5B1
  source 1..19: mol_type = other RNA
tccggttcctgcaggtgct

SEQ ID NO: 30 - RNA, 18 nt, synthetic construct
  variation 1..18: note = Note: the sequence may be DNA or RNA
  misc_feature 1..18: note = Description of sequence: ASO Sequence: MUCIN 5BExon22SPL5B2
  source 1..18: mol_type = other RNA
aagtggccatccccgtag

SEQ ID NO: 31 - RNA, 19 nt, synthetic construct
  variation 1..19: note = Note: the sequence may be DNA or RNA
  misc_feature 1..19: note = Description of sequence: ASO Sequence: MUCIN 5BExon 26SPL5B4
  source 1..19: mol_type = other RNA
acttggtggagtcaacctg

SEQ ID NO: 32 - RNA, 19 nt, synthetic construct
  variation 1..19: note = Note: the sequence may be DNA or RNA
  misc_feature 1..19: note = Description of sequence: ASO Sequence: MUCIN 5BExon 26SPL5B5
  source 1..19: mol_type = other RNA
gtacttggtggagtcaacc

SEQ ID NO: 33 - RNA, 18 nt, synthetic construct
  variation 1..18: note = Note: the sequence may be DNA or RNA
  misc_feature 1..18: note = Description of sequence: ASO Sequence: MUCIN 5BExon 26SPL5B6
  source 1..18: mol_type = other RNA
tgcagaaacactcgcagt

SEQ ID NO: 34 - RNA, 19 nt, synthetic construct
  variation 1..19: note = Note: the sequence may be DNA or RNA
  misc_feature 1..19: note = Description of sequence: ASO Sequence: MUCIN 5BExon 26SPL5B7
  source 1..19: mol_type = other RNA
tgcagaaacactcgcagtc

SEQ ID NO: 35 - RNA, 19 nt, synthetic construct
  variation 1..19: note = Note: the sequence may be DNA or RNA
  misc_feature 1..19: note = Description of sequence: ASO Sequence: MUCIN 5BExon 26SPL5B8
  source 1..19: mol_type = other RNA
gtgcagaaacactcgcagt

SEQ ID NO: 36 - RNA, 20 nt, synthetic construct
  variation 1..20: note = Note: the sequence may be DNA or RNA
  misc_feature 1..20: note = Description of sequence: ASO Sequence: MUCIN 5BExon 26SPL5B9
  source 1..20: mol_type = other RNA
gtgcagaaacactcgcagtc

SEQ ID NO: 37 - RNA, 18 nt, synthetic construct
  variation 1..18: note = Note: the sequence may be DNA or RNA
  misc_feature 1..18: note = Description of sequence: ASO Sequence: MUCIN 5BExon 26SPL5B10
  source 1..18: mol_type = other RNA
gcagaaacactcgcagtc

SEQ ID NO: 38 - RNA, 18 nt, synthetic construct
  variation 1..18: note = Note: the sequence may be DNA or RNA
  misc_feature 1..18: note = Description of sequence: ASO Sequence: MUCIN 5BExon 26SPL5B11
  source 1..18: mol_type = other RNA
gtgcagaaacactcgcag

SEQ ID NO: 39 - RNA, 18 nt, synthetic construct
  variation 1..18: note = Note: the sequence may be DNA or RNA
  misc_feature 1..18: note = Description of sequence: ASO Sequence: MUCIN 5BExon 26SPL5B12
  source 1..18: mol_type = other RNA
ccgactcacggcaggtgt

SEQ ID NO: 40 - RNA, 19 nt, synthetic construct
  variation 1..19: note = Note: the sequence may be DNA or RNA
  misc_feature 1..19: note = Description of sequence: ASO Sequence: MUCIN 5BExon28SPL5B13
  source 1..19: mol_type = other RNA
tggtcctcattgaagaagg

SEQ ID NO: 41 - RNA, 21 nt, synthetic construct
  variation 1..21: note = Note: the sequence may be DNA or RNA
  misc_feature 1..21: note = Description of sequence: ASO Sequence: MUCIN 5BExon28SPL5B14
  source 1..21: mol_type = other RNA
catctggtcctcattgaagaa

SEQ ID NO: 42 - RNA, 19 nt, synthetic construct
  variation 1..19: note = Note: the sequence may be DNA or RNA
  misc_feature 1..19: note = Description of sequence: ASO Sequence: MUCIN 5BExon28SPL5B15
  source 1..19: mol_type = other RNA
catctggtcctcattgaag

SEQ ID NO: 43 - RNA, 20 nt, synthetic construct
  variation 1..20: note = Note: the sequence may be DNA or RNA
  misc_feature 1..20: note = Description of sequence: ASO Sequence: MUCIN 5BExon28SPL5B16
  source 1..20: mol_type = other RNA
cttcatctggtcctcattga

SEQ ID NO: 44 - RNA, 20 nt, synthetic construct
  variation 1..20: note = Note: the sequence may be DNA or RNA
  misc_feature 1..20: note = Description of sequence: ASO Sequence: MUCIN 5BExon28SPL5B17
  source 1..20: mol_type = other RNA
acttcatctggtcctcattg

SEQ ID NO: 45 - RNA, 18 nt, synthetic construct
  variation 1..18: note = Note: the sequence may be DNA or RNA
  misc_feature 1..18: note = Description of sequence: ASO Sequence: MUCIN 5BExon28SPL5B18
  source 1..18: mol_type = other RNA
cacttcatctggtcctca

SEQ ID NO: 46 - RNA, 18 nt, synthetic construct
  variation 1..18: note = Note: the sequence may be DNA or RNA
  misc_feature 1..18: note = Description of sequence: ASO Sequence: MUCIN 5BExon28SPL5B19
  source 1..18: mol_type = other RNA
tcgtagcagccacactgg

SEQ ID NO: 47 - RNA, 18 nt, synthetic construct
  variation 1..18: note = Note: the sequence may be DNA or RNA
  misc_feature 1..18: note = Description of sequence: ASO Sequence: MUCIN 5BExon28SPL5B20
  source 1..18: mol_type = other RNA
ctcaccagctctggcagt

SEQ ID NO: 48 - RNA, 19 nt, synthetic construct
  variation 1..19: note = Note: the sequence may be DNA or RNA
  misc_feature 1..19: note = Description of sequence: ASO Sequence: MUCIN 5BExon28SPL5B21
  source 1..19: mol_type = other RNA
tcaccagctctggcagttc

SEQ ID NO: 49 - RNA, 20 nt, synthetic construct
  variation 1..20: note = Note: the sequence may be DNA or RNA
  misc_feature 1..20: note = Description of sequence: ASO Sequence: MUCIN 5BExon28SPL5B22
  source 1..20: mol_type = other RNA
accagctctggcagttctcc

SEQ ID NO: 50 - RNA, 18 nt, synthetic construct
  variation 1..18: note = Note: the sequence may be DNA or RNA
  misc_feature 1..18: note = Description of sequence: ASO Sequence: MUCIN 5BExon28SPL5B23
  source 1..18: mol_type = other RNA
cctcaccagctctggcag

SEQ ID NO: 51 - RNA, 22 nt, synthetic construct
  variation 1..22: note = Note: the sequence may be DNA or RNA
  misc_feature 1..22: note = Description of sequence: ASO Sequence: MUCIN 5BExon28SPL5B24
  source 1..22: mol_type = other RNA
ttcccaccccctcaccagctct

SEQ ID NO: 52 - RNA, 18 nt, synthetic construct
  variation 1..18: note = Note: the sequence may be DNA or RNA
  misc_feature 1..18: note = Description of sequence: ASO Sequence: MUCIN 5BExon28SPL5B25
  source 1..18: mol_type = other RNA
cttcccaccccctcacca

SEQ ID NO: 53 - RNA, 18 nt, synthetic construct
  variation 1..18: note = Note: the sequence may be DNA or RNA
  misc_feature 1..18: note = Description of sequence: ASO Sequence: MUCIN 5ACExon 5SPL5AC5-1
  source 1..18: mol_type = other RNA
accccagactggctgaag

SEQ ID NO: 54 - RNA, 20 nt, synthetic construct
  variation 1..20: note = Note: the sequence may be DNA or RNA
  misc_feature 1..20: note = Description of sequence: ASO Sequence: MUCIN 5ACExon 5SPL5AC5-2
  source 1..20: mol_type = other RNA
aggaccccagactggctgaa

SEQ ID NO: 55 - RNA, 22 nt, synthetic construct
  variation 1..22: note = Note: the sequence may be DNA or RNA
  misc_feature 1..22: note = Description of sequence: ASO Sequence: MUCIN 5ACExon 5SPL5AC5-3
  source 1..22: mol_type = other RNA
aatgaggaccccagactggctg

SEQ ID NO: 56 - RNA, 21 nt, synthetic construct
  variation 1..21: note = Note: the sequence may be DNA or RNA
  misc_feature 1..21: note = Description of sequence: ASO Sequence: MUCIN 5ACExon 5SPL5AC5-4
  source 1..21: mol_type = other RNA
tgaatgaggaccccagactgg

SEQ ID NO: 57 - RNA, 19 nt, synthetic construct
  variation 1..19: note = Note: the sequence may be DNA or RNA
  misc_feature 1..19: note = Description of sequence: ASO Sequence: MUCIN 5ACExon 5SPL5AC5-5
  source 1..19: mol_type = other RNA
tgaatgaggaccccagact

SEQ ID NO: 58 - RNA, 18 nt, synthetic construct
  variation 1..18: note = Note: the sequence may be DNA or RNA
  misc_feature 1..18: note = Description of sequence: ASO Sequence: MUCIN 5ACExon 5SPL5AC5-6
  source 1..18: mol_type = other RNA
ctgaatgaggaccccaga

SEQ ID NO: 59 - RNA, 20 nt, synthetic construct
  variation 1..20: note = Note: the sequence may be DNA or RNA
  misc_feature 1..20: note = Description of sequence: ASO Sequence: MUCIN 5ACExon 5SPL5AC5-7
  source 1..20: mol_type = other RNA
tctgctgaatgaggacccca

SEQ ID NO: 60 - RNA, 18 nt, synthetic construct
  variation 1..18: note = Note: the sequence may be DNA or RNA
  misc_feature 1..18: note = Description of sequence: ASO Sequence: MUCIN 5ACExon 5SPL5AC5-8
  source 1..18: mol_type = other RNA
ctctgctgaatgaggacc

SEQ ID NO: 61 - RNA, 19 nt, synthetic construct
  variation 1..19: note = Note: the sequence may be DNA or RNA
  misc_feature 1..19: note = Description of sequence: ASO Sequence: MUCIN 5ACExon 5SPL5AC5-9
  source 1..19: mol_type = other RNA
ctgctctgctgaatgagga

SEQ ID NO: 62 - RNA, 19 nt, synthetic construct
  variation 1..19: note = Note: the sequence may be DNA or RNA
  misc_feature 1..19: note = Description of sequence: ASO Sequence: MUCIN 5ACExon 5SPL5AC5-10
  source 1..19: mol_type = other RNA
ctgctgctctgctgaatga

SEQ ID NO: 63 - RNA, 20 nt, synthetic construct
  variation 1..20: note = Note: the sequence may be DNA or RNA
  misc_feature 1..20: note = Description of sequence: ASO Sequence: MUCIN 5ACExon 5SPL5AC5-11
  source 1..20: mol_type = other RNA
tagctgctgctctgctgaat

SEQ ID NO: 64 - RNA, 19 nt, synthetic construct
  variation 1..19: note = Note: the sequence may be DNA or RNA
  misc_feature 1..19: note = Description of sequence: ASO Sequence: MUCIN 5ACExon 5SPL5AC5-12
  source 1..19: mol_type = other RNA
agctgctgctctgctgaat

SEQ ID NO: 65 - RNA, 18 nt, synthetic construct
  variation 1..18: note = Note: the sequence may be DNA or RNA
  misc_feature 1..18: note = Description of sequence: ASO Sequence: MUCIN 5ACExon 5SPL5AC5-13
  source 1..18: mol_type = other RNA
tagctgctgctctgctga

SEQ ID NO: 66 - RNA, 18 nt, synthetic construct
  variation 1..18: note = Note: the sequence may be DNA or RNA
  misc_feature 1..18: note = Description of sequence: ASO Sequence: MUCIN 5ACExon 5SPL5AC5-14
  source 1..18: mol_type = other RNA
tgtagctgctgctctgct

SEQ ID NO: 67 - RNA, 19 nt, synthetic construct
  variation 1..19: note = Note: the sequence may be DNA or RNA
  misc_feature 1..19: note = Description of sequence: ASO Sequence: MUCIN 5ACExon 5SPL5AC5-15
  source 1..19: mol_type = other RNA
ttggtgtagctgctgctct

SEQ ID NO: 68 - RNA, 18 nt, synthetic construct
  variation 1..18: note = Note: the sequence may be DNA or RNA
  misc_feature 1..18: note = Description of sequence: ASO Sequence: MUCIN 5ACExon 5SPL5AC5-16
  source 1..18: mol_type = other RNA
cttggtgtagctgctgct

SEQ ID NO: 69 - RNA, 18 nt, synthetic construct
  variation 1..18: note = Note: the sequence may be DNA or RNA
  misc_feature 1..18: note = Description of sequence: ASO Sequence: MUCIN 5ACExon 5SPL5AC5-17
  source 1..18: mol_type = other RNA
caccttggtgtagctgct

SEQ ID NO: 70 - RNA, 18 nt, synthetic construct
  variation 1..18: note = Note: the sequence may be DNA or RNA
  misc_feature 1..18: note = Description of sequence: ASO Sequence: MUCIN 5ACExon 5SPL5AC5-18
  source 1..18: mol_type = other RNA
ctccaccttggtgtagct

SEQ ID NO: 71 - RNA, 19 nt, synthetic construct
  variation 1..19: note = Note: the sequence may be DNA or RNA
  misc_feature 1..19: note = Description of sequence: ASO Sequence: MUCIN 5ACExon 5SPL5AC5-19
  source 1..19: mol_type = other RNA
tggcctccaccttggtgta

SEQ ID NO: 72 - RNA, 20 nt, synthetic construct
  variation 1..20: note = Note: the sequence may be DNA or RNA
  misc_feature 1..20: note = Description of sequence: ASO Sequence: MUCIN 5ACExon 5SPL5AC5-20
  source 1..20: mol_type = other RNA
atgaggacaaggcccagcct

SEQ ID NO: 73 - RNA, 18 nt, synthetic construct
  variation 1..18: note = Note: the sequence may be DNA or RNA
  misc_feature 1..18: note = Description of sequence: ASO Sequence: MUCIN 5ACExon 5SPL5AC5-21
  source 1..18: mol_type = other RNA
acatgaggacaaggccca

SEQ ID NO: 74 - RNA, 19 nt, synthetic construct
  variation 1..19: note = Note: the sequence may be DNA or RNA
  misc_feature 1..19: note = Description of sequence: ASO Sequence: MUCIN 5ACExon 5SPL5AC5-22
  source 1..19: mol_type = other RNA
ttccacatgaggacaaggc

SEQ ID NO: 75 - RNA, 19 nt, synthetic construct
  variation 1..19: note = Note: the sequence may be DNA or RNA
  misc_feature 1..19: note = Description of sequence: ASO Sequence: MUCIN 5ACExon 5SPL5AC5-23
  source 1..19: mol_type = other RNA
ggttccacatgaggacaag

SEQ ID NO: 76 - RNA, 18 nt, synthetic construct
  variation 1..18: note = Note: the sequence may be DNA or RNA
  misc_feature 1..18: note = Description of sequence: ASO Sequence: MUCIN 5ACExon 5SPL5AC5-24
  source 1..18: mol_type = other RNA
tggttccacatgaggaca

SEQ ID NO: 77 - RNA, 18 nt, synthetic construct
  variation 1..18: note = Note: the sequence may be DNA or RNA
  misc_feature 1..18: note = Description of sequence: ASO Sequence: MUCIN 5ACExon 5SPL5AC5-25
  source 1..18: mol_type = other RNA
cgtggttccacatgagga

SEQ ID NO: 78 - RNA, 19 nt, synthetic construct
  variation 1..19: note = Note: the sequence may be DNA or RNA
  misc_feature 1..19: note = Description of sequence: ASO Sequence: MUCIN 5ACExon 5SPL5AC5-26
  source 1..19: mol_type = other RNA
gtcatcgtggttccacatg

SEQ ID NO: 79 - RNA, 18 nt, synthetic construct
  variation 1..18: note = Note: the sequence may be DNA or RNA
  misc_feature 1..18: note = Description of sequence: ASO Sequence: MUCIN 5ACExon 5SPL5AC5-27
  source 1..18: mol_type = other RNA
tgtcatcgtggttccaca

SEQ ID NO: 80 - RNA, 18 nt, synthetic construct
  variation 1..18: note = Note: the sequence may be DNA or RNA
  misc_feature 1..18: note = Description of sequence: ASO Sequence: MUCIN 5ACExon 5SPL5AC5-28
  source 1..18: mol_type = other RNA
gctgtcatcgtggttcca

SEQ ID NO: 81 - RNA, 18 nt, synthetic construct
  variation 1..18: note = Note: the sequence may be DNA or RNA
  misc_feature 1..18: note = Description of sequence: ASO Sequence: MUCIN 5ACExon 5SPL5AC5-29
  source 1..18: mol_type = other RNA
aggctgtcatcgtggttc

SEQ ID NO: 82 - RNA, 19 nt, synthetic construct
  variation 1..19: note = Note: the sequence may be DNA or RNA
  misc_feature 1..19: note = Description of sequence: ASO Sequence: MUCIN 5ACExon 5SPL5AC5-30
  source 1..19: mol_type = other RNA
agcaggctgtcatcgtggt

SEQ ID NO: 83 - RNA, 19 nt, synthetic construct
  variation 1..19: note = Note: the sequence may be DNA or RNA
  misc_feature 1..19: note = Description of sequence: ASO Sequence: MUCIN 5BExon 5SPL5B5-1
  source 1..19: mol_type = other RNA
tgtaaggcagctcctccct

SEQ ID NO: 84 - RNA, 18 nt, synthetic construct
  variation 1..18: note = Note: the sequence may be DNA or RNA
  misc_feature 1..18: note = Description of sequence: ASO Sequence: MUCIN 5BExon 5SPL5B5-2
  source 1..18: mol_type = other RNA
tgtaaggcagctcctccc

SEQ ID NO: 85 - RNA, 18 nt, synthetic construct
  variation 1..18: note = Note: the sequence may be DNA or RNA
  misc_feature 1..18: note = Description of sequence: ASO Sequence: MUCIN 5BExon 5SPL5B5-3
  source 1..18: mol_type = other RNA
ctgtaaggcagctcctcc

SEQ ID NO: 86 - RNA, 18 nt, synthetic construct
  variation 1..18: note = Note: the sequence may be DNA or RNA
  misc_feature 1..18: note = Description of sequence: ASO Sequence: MUCIN 5BExon 5SPL5B5-4
  source 1..18: mol_type = other RNA
agtgcggctgtaaggcag

SEQ ID NO: 87 - RNA, 18 nt, synthetic construct
  variation 1..18: note = Note: the sequence may be DNA or RNA
  misc_feature 1..18: note = Description of sequence: ASO Sequence: MUCIN 5BExon 5SPL5B5-5
  source 1..18: mol_type = other RNA
cagtgcggctgtaaggca

SEQ ID NO: 88 - RNA, 22 nt, synthetic construct
  variation 1..22: note = Note: the sequence may be DNA or RNA
  misc_feature 1..22: note = Description of sequence: ASO Sequence: MUCIN 5BExon 5SPL5B5-6
  source 1..22: mol_type = other RNA
atgtagtccccgctctgctcca

SEQ ID NO: 89 - RNA, 19 nt, synthetic construct
  variation 1..19: note = Note: the sequence may be DNA or RNA
  misc_feature 1..19: note = Description of sequence: ASO Sequence: MUCIN 5BExon 5SPL5B5-7
  source 1..19: mol_type = other RNA
atgtagtccccgctctgct

SEQ ID NO: 90 - RNA, 19 nt, synthetic construct
  variation 1..19: note = Note: the sequence may be DNA or RNA
  misc_feature 1..19: note = Description of sequence: ASO Sequence: MUCIN 5BExon 5SPL5B5-8
  source 1..19: mol_type = other RNA
ttgatgtagtccccgctct

SEQ ID NO: 91 - RNA, 18 nt, synthetic construct
  variation 1..18: note = Note: the sequence may be DNA or RNA
  misc_feature 1..18: note = Description of sequence: ASO Sequence: MUCIN 5BExon 5SPL5B5-9
  source 1..18: mol_type = other RNA
cttgatgtagtccccgct

SEQ ID NO: 92 - RNA, 19 nt, synthetic construct
  variation 1..19: note = Note: the sequence may be DNA or RNA
  misc_feature 1..19: note = Description of sequence: ASO Sequence: MUCIN 5BExon 5SPL5B5-10
  source 1..19: mol_type = other RNA
tgaccttgatgtagtcccc

SEQ ID NO: 93 - RNA, 18 nt, synthetic construct
  variation 1..18: note = Note: the sequence may be DNA or RNA
  misc_feature 1..18: note = Description of sequence: ASO Sequence: MUCIN 5BExon 5SPL5B5-11
  source 1..18: mol_type = other RNA
gctgaccttgatgtagtc

SEQ ID NO: 94 - RNA, 19 nt, synthetic construct
  variation 1..19: note = Note: the sequence may be DNA or RNA
  misc_feature 1..19: note = Description of sequence: ASO Sequence: MUCIN 5BExon 5SPL5B5-12
  source 1..19: mol_type = other RNA
ggatgctgaccttgatgta

SEQ ID NO: 95 - RNA, 18 nt, synthetic construct
  variation 1..18: note = Note: the sequence may be DNA or RNA
  misc_feature 1..18: note = Description of sequence: ASO Sequence: MUCIN 5BExon 5SPL5B5-13
  source 1..18: mol_type = other RNA
ccggatgctgaccttgat

SEQ ID NO: 96 - RNA, 18 nt, synthetic construct
  variation 1..18: note = Note: the sequence may be DNA or RNA
  misc_feature 1..18: note = Description of sequence: ASO Sequence: MUCIN 5BExon 5SPL5B5-14
  source 1..18: mol_type = other RNA
cagccggatgctgacctt

SEQ ID NO: 97 - RNA, 22 nt, synthetic construct
  variation 1..22: note = Note: the sequence may be DNA or RNA
  misc_feature 1..22: note = Description of sequence: ASO Sequence: MUCIN 5BExon 5SPL5B5-15
  source 1..22: mol_type = other RNA
atgtcagcaccagccggatgct

SEQ ID NO: 98 - RNA, 19 nt, synthetic construct
  variation 1..19: note = Note: the sequence may be DNA or RNA
  misc_feature 1..19: note = Description of sequence: ASO Sequence: MUCIN 5BExon 5SPL5B5-16
  source 1..19: mol_type = other RNA
atgtcagcaccagccggat

SEQ ID NO: 99 - RNA, 19 nt, synthetic construct
  variation 1..19: note = Note: the sequence may be DNA or RNA
  misc_feature 1..19: note = Description of sequence: ASO Sequence: MUCIN 5BExon 5SPL5B5-17
  source 1..19: mol_type = other RNA
aggaatgtcagcaccagcc

SEQ ID NO: 100 - RNA, 19 nt, synthetic construct
  variation 1..19: note = Note: the sequence may be DNA or RNA
  misc_feature 1..19: note = Description of sequence: ASO Sequence: MUCIN 5BExon 5SPL5B5-18
  source 1..19: mol_type = other RNA
acaggaatgtcagcaccag

SEQ ID NO: 101 - RNA, 19 nt, synthetic construct
  variation 1..19: note = Note: the sequence may be DNA or RNA
  misc_feature 1..19: note = Description of sequence: ASO Sequence: MUCIN 5BExon 5SPL5B5-19
  source 1..19: mol_type = other RNA
tccacaggaatgtcagcac

SEQ ID NO: 102 - RNA, 18 nt, synthetic construct
  variation 1..18: note = Note: the sequence may be DNA or RNA
  misc_feature 1..18: note = Description of sequence: ASO Sequence: MUCIN 5BExon 5SPL5B5-20
  source 1..18: mol_type = other RNA
gttccacaggaatgtcag

SEQ ID NO: 103 - RNA, 19 nt, synthetic construct
  variation 1..19: note = Note: the sequence may be DNA or RNA
  misc_feature 1..19: note = Description of sequence: ASO Sequence: MUCIN 5BExon 5SPL5B5-21
  source 1..19: mol_type = other RNA
tctccgttccacaggaatg

SEQ ID NO: 104 - RNA, 18 nt, synthetic construct
  variation 1..18: note = Note: the sequence may be DNA or RNA
  misc_feature 1..18: note = Description of sequence: ASO Sequence: MUCIN 5BExon 5SPL5B5-22
  source 1..18: mol_type = other RNA
ctctccgttccacaggaa

SEQ ID NO: 105 - RNA, 19 nt, synthetic construct
  variation 1..19: note = Note: the sequence may be DNA or RNA
  misc_feature 1..19: note = Description of sequence: ASO Sequence: MUCIN 5BExon 5SPL5B5-23
  source 1..19: mol_type = other RNA
tgtcctctccgttccacag

SEQ ID NO: 106 - RNA, 18 nt, synthetic construct
  variation 1..18: note = Note: the sequence may be DNA or RNA
  misc_feature 1..18: note = Description of sequence: ASO Sequence: MUCIN 5BExon 5SPL5B5-24
  source 1..18: mol_type = other RNA
actgtcctctccgttcca

SEQ ID NO: 107 - RNA, 18 nt, synthetic construct
  variation 1..18: note = Note: the sequence may be DNA or RNA
  misc_feature 1..18: note = Description of sequence: ASO Sequence: MUCIN 5BExon 5SPL5B5-25
  source 1..18: mol_type = other RNA
ggcactgtcctctccgtt

SEQ ID NO: 108 - RNA, 18 nt, Homo sapiens
  misc_feature 1..18: note = Description of sequences: MUCIN 5ACExon 5SPL5AC1
  source 1..18: mol_type = mRNA
tgccttcctccacagggt

SEQ ID NO: 109 - RNA, 18 nt, Homo sapiens
  misc_feature 1..18: note = Description of sequences: MUCIN 5ACExon 5SPL5AC2
  source 1..18: mol_type = mRNA
ttcctccacagggtcctg

SEQ ID NO: 110 - RNA, 20 nt, Homo sapiens
  misc_feature 1..20: note = Description of sequences: MUCIN 5ACExon 5SPL5AC3
  source 1..20: mol_type = mRNA
agccagtctggggtcctcat

SEQ ID NO: 111 - RNA, 21 nt, Homo sapiens
  misc_feature 1..21: note = Description of sequences: MUCIN 5ACExon 5SPL5AC4
  source 1..21: mol_type = mRNA
agccagtctggggtcctcatt

SEQ ID NO: 112 - RNA, 18 nt, Homo sapiens
  misc_feature 1..18: note = Description of sequences: MUCIN 5ACExon 5SPL5AC5
  source 1..18: mol_type = mRNA
ccagtctggggtcctcat

SEQ ID NO: 113 - RNA, 18 nt, Homo sapiens
  misc_feature 1..18: note = Description of sequences: MUCIN 5ACExon 5SPL5AC6
  source 1..18: mol_type = mRNA
cagtctggggtcctcatt

SEQ ID NO: 114 - RNA, 19 nt, Homo sapiens
  misc_feature 1..19: note = Description of sequences: MUCIN 5ACExon 5SPL5AC7
  source 1..19: mol_type = mRNA
ccagtctggggtcctcatt

SEQ ID NO: 115 - RNA, 20 nt, Homo sapiens
  misc_feature 1..20: note = Description of sequences: MUCIN 5ACExon 5SPL5AC8
  source 1..20: mol_type = mRNA
gccagtctggggtcctcatt

SEQ ID NO: 116 - RNA, 22 nt, Homo sapiens
  misc_feature 1..22: note = Description of sequences: MUCIN 5ACExon 5SPL5AC9
  source 1..22: mol_type = mRNA
accacgatgacagcctgctggt

SEQ ID NO: 117 - RNA, 18 nt, Homo sapiens
  misc_feature 1..18: note = Description of sequences: MUCIN 5ACExon 5SPL5AC10
  source 1..18: mol_type = mRNA
atgacagcctgctggtga

SEQ ID NO: 118 - RNA, 19 nt, Homo sapiens
  misc_feature 1..19: note = Description of sequences: MUCIN 5ACExon 16SPL5AC11
  source 1..19: mol_type = mRNA
ctgtccacagagaagtatg

SEQ ID NO: 119 - RNA, 19 nt, Homo sapiens
  misc_feature 1..19: note = Description of sequences: MUCIN 5ACExon 16SPL5AC12
  source 1..19: mol_type = mRNA
cacagagaagtatgctcag

SEQ ID NO: 120 - RNA, 19 nt, Homo sapiens
  misc_feature 1..19: note = Description of sequences: MUCIN 5ACExon 16SPL5AC13
  source 1..19: mol_type = mRNA
agagaagtatgctcagcac

SEQ ID NO: 121 - RNA, 18 nt, Homo sapiens
  misc_feature 1..18: note = Description of sequences: MUCIN 5ACExon 16SPL5AC14
  source 1..18: mol_type = mRNA
aagtatgctcagcactgg

SEQ ID NO: 122 - RNA, 19 nt, Homo sapiens
  misc_feature 1..19: note = Description of sequences: MUCIN 5ACExon 16SPL5AC15
  source 1..19: mol_type = mRNA
aagtatgctcagcactggt

SEQ ID NO: 123 - RNA, 18 nt, Homo sapiens
  misc_feature 1..18: note = Description of sequences: MUCIN 5ACExon 16SPL5AC16
  source 1..18: mol_type = mRNA
agtatgctcagcactggt

SEQ ID NO: 124 - RNA, 18 nt, Homo sapiens
  misc_feature 1..18: note = Description of sequences: MUCIN 5ACExon 16SPL5AC17
  source 1..18: mol_type = mRNA
gtatgctcagcactggtg

SEQ ID NO: 125 - RNA, 19 nt, Homo sapiens
  misc_feature 1..19: note = Description of sequences: MUCIN 5ACExon 16SPL5AC18
  source 1..19: mol_type = mRNA
agtatgctcagcactggtg

SEQ ID NO: 126 - RNA, 20 nt, Homo sapiens
  misc_feature 1..20: note = Description of sequences: MUCIN 5ACExon 16SPL5AC19
  source 1..20: mol_type = mRNA
aagtatgctcagcactggtg

SEQ ID NO: 127 - RNA, 20 nt, Homo sapiens
  misc_feature 1..20: note = Description of sequences: MUCIN 5ACExon 16SPL5AC20
  source 1..20: mol_type = mRNA
ggaacctactactcggtaac

SEQ ID NO: 128 - RNA, 19 nt, Homo sapiens
  misc_feature 1..19: note = Description of sequences: MUCIN 5ACExon 16SPL5AC21
  source 1..19: mol_type = mRNA
cctactactcggtaacatc

SEQ ID NO: 129 - RNA, 19 nt, Homo sapiens
  misc_feature 1..19: note = Description of sequences: MUCIN 5ACExon 16SPL5AC22
  source 1..19: mol_type = mRNA
actactcggtaacatctgc

SEQ ID NO: 130 - RNA, 19 nt, Homo sapiens
  misc_feature 1..19: note = Description of sequences: MUCIN 5ACExon 16SPL5AC23
  source 1..19: mol_type = mRNA
tcggtaacatctgccgcct

SEQ ID NO: 131 - RNA, 22 nt, Homo sapiens
  misc_feature 1..22: note = Description of sequences: MUCIN 5ACExon26SPL5AC24
  source 1..22: mol_type = mRNA
aggtggagccggccaggtacta

SEQ ID NO: 132 - RNA, 18 nt, Homo sapiens
  misc_feature 1..18: note = Description of sequences: MUCIN 5ACExon26SPL5AC25
  source 1..18: mol_type = mRNA
ccaggcctgccatgaagt

SEQ ID NO: 133 - RNA, 18 nt, Homo sapiens
  misc_feature 1..18: note = Description of sequences: MUCIN 5ACExon26SPL5AC26
  source 1..18: mol_type = mRNA
gagcatctgccgtgagtg

SEQ ID NO: 134 - RNA, 19 nt, Homo sapiens
  misc_feature 1..19: note = Description of sequences: MUCIN 5ACExon26SPL5AC27
  source 1..19: mol_type = mRNA
atctgccgtgagtgcgagt

SEQ ID NO: 135 - RNA, 20 nt, Homo sapiens
  misc_feature 1..20: note = Description of sequences: MUCIN 5ACExon26SPL5AC28
  source 1..20: mol_type = mRNA
agcatctgccgtgagtgcga

SEQ ID NO: 136 - RNA, 19 nt, Homo sapiens
  misc_feature 1..19: note = Description of sequences: MUCIN 5BExon22SPL5B1
  source 1..19: mol_type = mRNA
agcacctgcaggaaccgga

SEQ ID NO: 137 - RNA, 18 nt, Homo sapiens
  misc_feature 1..18: note = Description of sequences: MUCIN 5BExon22SPL5B2
  source 1..18: mol_type = mRNA
ctacggggatggccactt

SEQ ID NO: 138 - RNA, 19 nt, Homo sapiens
  misc_feature 1..19: note = Description of sequences: MUCIN 5BExon 26SPL5B4
  source 1..19: mol_type = mRNA
caggttgactccaccaagt

SEQ ID NO: 139 - RNA, 19 nt, Homo sapiens
  misc_feature 1..19: note = Description of sequences: MUCIN 5BExon 26SPL5B5
  source 1..19: mol_type = mRNA
ggttgactccaccaagtac

SEQ ID NO: 140 - RNA, 18 nt, Homo sapiens
  misc_feature 1..18: note = Description of sequences: MUCIN 5BExon 26SPL5B6
  source 1..18: mol_type = mRNA
actgcgagtgtttctgca

SEQ ID NO: 141 - RNA, 19 nt, Homo sapiens
  misc_feature 1..19: note = Description of sequences: MUCIN 5BExon 26SPL5B7
  source 1..19: mol_type = mRNA
gactgcgagtgtttctgca

SEQ ID NO: 142 - RNA, 19 nt, Homo sapiens
  misc_feature 1..19: note = Description of sequences: MUCIN 5BExon 26SPL5B8
  source 1..19: mol_type = mRNA
actgcgagtgtttctgcac

SEQ ID NO: 143 - RNA, 20 nt, Homo sapiens
  misc_feature 1..20: note = Description of sequences: MUCIN 5BExon 26SPL5B9
  source 1..20: mol_type = mRNA
gactgcgagtgtttctgcac

SEQ ID NO: 144 - RNA, 18 nt, Homo sapiens
  misc_feature 1..18: note = Description of sequences: MUCIN 5BExon 26SPL5B10
  source 1..18: mol_type = mRNA
gactgcgagtgtttctgc

SEQ ID NO: 145 - RNA, 18 nt, Homo sapiens
  misc_feature 1..18: note = Description of sequences: MUCIN 5BExon 26SPL5B11
  source 1..18: mol_type = mRNA
ctgcgagtgtttctgcac

SEQ ID NO: 146 - RNA, 18 nt, Homo sapiens
  misc_feature 1..18: note = Description of sequences: MUCIN 5BExon 26SPL5B12
  source 1..18: mol_type = mRNA
acacctgccgtgagtcgg

SEQ ID NO: 147 - RNA, 19 nt, Homo sapiens
  misc_feature 1..19: note = Description of sequences: MUCIN 5BExon28SPL5B13
  source 1..19: mol_type = mRNA
ccttcttcaatgaggacca

SEQ ID NO: 148 - RNA, 21 nt, Homo sapiens
  misc_feature 1..21: note = Description of sequences: MUCIN 5BExon28SPL5B14
  source 1..21: mol_type = mRNA
ttcttcaatgaggaccagatg

SEQ ID NO: 149 - RNA, 19 nt, Homo sapiens
  misc_feature 1..19: note = Description of sequences: MUCIN 5BExon28SPL5B15
  source 1..19: mol_type = mRNA
cttcaatgaggaccagatg

SEQ ID NO: 150 - RNA, 20 nt, Homo sapiens
  misc_feature 1..20: note = Description of sequences: MUCIN 5BExon28SPL5B16
  source 1..20: mol_type = mRNA
tcaatgaggaccagatgaag

SEQ ID NO: 151 - RNA, 20 nt, Homo sapiens
  misc_feature 1..20: note = Description of sequences: MUCIN 5BExon28SPL5B17
  source 1..20: mol_type = mRNA
caatgaggaccagatgaagt

SEQ ID NO: 152 - RNA, 18 nt, Homo sapiens
  misc_feature 1..18: note = Description of sequences: MUCIN 5BExon28SPL5B18
  source 1..18: mol_type = mRNA
tgaggaccagatgaagtg

SEQ ID NO: 153 - RNA, 18 nt, Homo sapiens
  misc_feature 1..18: note = Description of sequences: MUCIN 5BExon28SPL5B19
  source 1..18: mol_type = mRNA
ccagtgtggctgctacga

SEQ ID NO: 154 - RNA, 18 nt, Homo sapiens
  misc_feature 1..18: note = Description of sequences: MUCIN 5BExon28SPL5B20
  source 1..18: mol_type = mRNA
actgccagagctggtgag

SEQ ID NO: 155 - RNA, 19 nt, Homo sapiens
  misc_feature 1..19: note = Description of sequences: MUCIN 5BExon28SPL5B21
  source 1..19: mol_type = mRNA
gaactgccagagctggtga

SEQ ID NO: 156 - RNA, 20 nt, Homo sapiens
  misc_feature 1..20: note = Description of sequences: MUCIN 5BExon28SPL5B22
  source 1..20: mol_type = mRNA
ggagaactgccagagctggt

SEQ ID NO: 157 - RNA, 18 nt, Homo sapiens
  misc_feature 1..18: note = Description of sequences: MUCIN 5BExon28SPL5B23
  source 1..18: mol_type = mRNA
ctgccagagctggtgagg

SEQ ID NO: 158 - RNA, 22 nt, Homo sapiens
  misc_feature 1..22: note = Description of sequences: MUCIN 5BExon28SPL5B24
  source 1..22: mol_type = mRNA
agagctggtgagggggtgggaa

SEQ ID NO: 159 - RNA, 18 nt, Homo sapiens
  misc_feature 1..18: note = Description of sequences: MUCIN 5BExon28SPL5B25
  source 1..18: mol_type = mRNA
tggtgagggggtgggaag

SEQ ID NO: 160 - RNA, 18 nt, Homo sapiens
  misc_feature 1..18: note = Description of sequences: MUCIN 5ACExon 5SPL5AC5-1
  source 1..18: mol_type = mRNA
cttcagccagtctggggt

SEQ ID NO: 161 - RNA, 20 nt, Homo sapiens
  misc_feature 1..20: note = Description of sequences: MUCIN 5ACExon 5SPL5AC5-2
  source 1..20: mol_type = mRNA
ttcagccagtctggggtcct

SEQ ID NO: 162 - RNA, 22 nt, Homo sapiens
  misc_feature 1..22: note = Description of sequences: MUCIN 5ACExon 5SPL5AC5-3
  source 1..22: mol_type = mRNA
cagccagtctggggtcctcatt

SEQ ID NO: 163 - RNA, 21 nt, Homo sapiens
  misc_feature 1..21: note = Description of sequences: MUCIN 5ACExon 5SPL5AC5-4
  source 1..21: mol_type = mRNA
ccagtctggggtcctcattca

SEQ ID NO: 164 - RNA, 19 nt, Homo sapiens
  misc_feature 1..19: note = Description of sequences: MUCIN 5ACExon 5SPL5AC5-5
  source 1..19: mol_type = mRNA
agtctggggtcctcattca

SEQ ID NO: 165 - RNA, 18 nt, Homo sapiens
  misc_feature 1..18: note = Description of sequences: MUCIN 5ACExon 5SPL5AC5-6
  source 1..18: mol_type = mRNA
tctggggtcctcattcag

SEQ ID NO: 166 - RNA, 20 nt, Homo sapiens
  misc_feature 1..20: note = Description of sequences: MUCIN 5ACExon 5SPL5AC5-7
  source 1..20: mol_type = mRNA
tggggtcctcattcagcaga

SEQ ID NO: 167 - RNA, 18 nt, Homo sapiens
  misc_feature 1..18: note = Description of sequences: MUCIN 5ACExon 5SPL5AC5-8
  source 1..18: mol_type = mRNA
ggtcctcattcagcagag

SEQ ID NO: 168 - RNA, 19 nt, Homo sapiens
  misc_feature 1..19: note = Description of sequences: MUCIN 5ACExon 5SPL5AC5-9
  source 1..19: mol_type = mRNA
tcctcattcagcagagcag

SEQ ID NO: 169 - RNA, 19 nt, Homo sapiens
  misc_feature 1..19: note = Description of sequences: MUCIN 5ACExon 5SPL5AC5-10
  source 1..19: mol_type = mRNA
tcattcagcagagcagcag

SEQ ID NO: 170 - RNA, 20 nt, Homo sapiens
  misc_feature 1..20: note = Description of sequences: MUCIN 5ACExon 5SPL5AC5-11
  source 1..20: mol_type = mRNA
attcagcagagcagcagcta

SEQ ID NO: 171 - RNA, 19 nt, Homo sapiens
  misc_feature 1..19: note = Description of sequences: MUCIN 5ACExon 5SPL5AC5-12
  source 1..19: mol_type = mRNA
attcagcagagcagcagct

SEQ ID NO: 172 - RNA, 18 nt, Homo sapiens
  misc_feature 1..18: note = Description of sequences: MUCIN 5ACExon 5SPL5AC5-13
  source 1..18: mol_type = mRNA
tcagcagagcagcagcta

SEQ ID NO: 173 - RNA, 18 nt, Homo sapiens
  misc_feature 1..18: note = Description of sequences: MUCIN 5ACExon 5SPL5AC5-14
  source 1..18: mol_type = mRNA
agcagagcagcagctaca

SEQ ID NO: 174 - RNA, 19 nt, Homo sapiens
  misc_feature 1..19: note = Description of sequences: MUCIN 5ACExon 5SPL5AC5-15
  source 1..19: mol_type = mRNA
agagcagcagctacaccaa

SEQ ID NO: 175 - RNA, 18 nt, Homo sapiens
  misc_feature 1..18: note = Description of sequences: MUCIN 5ACExon 5SPL5AC5-16
  source 1..18: mol_type = mRNA
agcagcagctacaccaag

SEQ ID NO: 176 - RNA, 18 nt, Homo sapiens
  misc_feature 1..18: note = Description of sequences: MUCIN 5ACExon 5SPL5AC5-17
  source 1..18: mol_type = mRNA
agcagctacaccaaggtg

SEQ ID NO: 177 - RNA, 18 nt, Homo sapiens
  misc_feature 1..18: note = Description of sequences: MUCIN 5ACExon 5SPL5AC5-18
  source 1..18: mol_type = mRNA
agctacaccaaggtggag

SEQ ID NO: 178 - RNA, 19 nt, Homo sapiens
  misc_feature 1..19: note = Description of sequences: MUCIN 5ACExon 5SPL5AC5-19
  source 1..19: mol_type = mRNA
tacaccaaggtggaggcca

SEQ ID NO: 179 - RNA, 20 nt, Homo sapiens
  misc_feature 1..20: note = Description of sequences: MUCIN 5ACExon 5SPL5AC5-20
  source 1..20: mol_type = mRNA
aggctgggccttgtcctcat

SEQ ID NO: 180 - RNA, 18 nt, Homo sapiens
  misc_feature 1..18: note = Description of sequences: MUCIN 5ACExon 5SPL5AC5-21
  source 1..18: mol_type = mRNA
tgggccttgtcctcatgt

SEQ ID NO: 181 - RNA, 19 nt, Homo sapiens
  misc_feature 1..19: note = Description of sequences: MUCIN 5ACExon 5SPL5AC5-22
  source 1..19: mol_type = mRNA
gccttgtcctcatgtggaa

SEQ ID NO: 182 - RNA, 19 nt, Homo sapiens
  misc_feature 1..19: note = Description of sequences: MUCIN 5ACExon 5SPL5AC5-23
  source 1..19: mol_type = mRNA
cttgtcctcatgtggaacc

SEQ ID NO: 183 - RNA, 18 nt, Homo sapiens
  misc_feature 1..18: note = Description of sequences: MUCIN 5ACExon 5SPL5AC5-24
  source 1..18: mol_type = mRNA
tgtcctcatgtggaacca

SEQ ID NO: 184 - RNA, 18 nt, Homo sapiens
  misc_feature 1..18: note = Description of sequences: MUCIN 5ACExon 5SPL5AC5-25
  source 1..18: mol_type = mRNA
tcctcatgtggaaccacg

SEQ ID NO: 185 - RNA, 19 nt, Homo sapiens
  misc_feature 1..19: note = Description of sequences: MUCIN 5ACExon 5SPL5AC5-26
  source 1..19: mol_type = mRNA
catgtggaaccacgatgac

SEQ ID NO: 186 - RNA, 18 nt, Homo sapiens
  misc_feature 1..18: note = Description of sequences: MUCIN 5ACExon 5SPL5AC5-27
  source 1..18: mol_type = mRNA
tgtggaaccacgatgaca

SEQ ID NO: 187 - RNA, 18 nt, Homo sapiens
  misc_feature 1..18: note = Description of sequences: MUCIN 5ACExon 5SPL5AC5-28
  source 1..18: mol_type = mRNA
tggaaccacgatgacagc

SEQ ID NO: 188 - RNA, 18 nt, Homo sapiens
  misc_feature 1..18: note = Description of sequences: MUCIN 5ACExon 5SPL5AC5-29
  source 1..18: mol_type = mRNA
gaaccacgatgacagcct

SEQ ID NO: 189 - RNA, 19 nt, Homo sapiens
  misc_feature 1..19: note = Description of sequences: MUCIN 5ACExon 5SPL5AC5-30
  source 1..19: mol_type = mRNA
accacgatgacagcctgct

SEQ ID NO: 190 - RNA, 19 nt, Homo sapiens
  misc_feature 1..19: note = Description of sequences: MUCIN 5BExon 5SPL5B5-1
  source 1..19: mol_type = mRNA
agggaggagctgccttaca

SEQ ID NO: 191 - RNA, 18 nt, Homo sapiens
  misc_feature 1..18: note = Description of sequences: MUCIN 5BExon 5SPL5B5-2
  source 1..18: mol_type = mRNA
gggaggagctgccttaca

SEQ ID NO: 192 - RNA, 18 nt, Homo sapiens
  misc_feature 1..18: note = Description of sequences: MUCIN 5BExon 5SPL5B5-3
  source 1..18: mol_type = mRNA
ggaggagctgccttacag

SEQ ID NO: 193 - RNA, 18 nt, Homo sapiens
  misc_feature 1..18: note = Description of sequences: MUCIN 5BExon 5SPL5B5-4
  source 1..18: mol_type = mRNA
ctgccttacagccgcact

SEQ ID NO: 194 - RNA, 18 nt, Homo sapiens
  misc_feature 1..18: note = Description of sequences: MUCIN 5BExon 5SPL5B5-5
  source 1..18: mol_type = mRNA
tgccttacagccgcactg

SEQ ID NO: 195 - RNA, 22 nt, Homo sapiens
  misc_feature 1..22: note = Description of sequences: MUCIN 5BExon 5SPL5B5-6
  source 1..22: mol_type = mRNA
tggagcagagcggggactacat

SEQ ID NO: 196 - RNA, 19 nt, Homo sapiens
  misc_feature 1..19: note = Description of sequences: MUCIN 5BExon 5SPL5B5-7
  source 1..19: mol_type = mRNA
agcagagcggggactacat

SEQ ID NO: 197 - RNA, 19 nt, Homo sapiens
  misc_feature 1..19: note = Description of sequences: MUCIN 5BExon 5SPL5B5-8
  source 1..19: mol_type = mRNA
agagcggggactacatcaa

SEQ ID NO: 198 - RNA, 18 nt, Homo sapiens
  misc_feature 1..18: note = Description of sequences: MUCIN 5BExon 5SPL5B5-9
  source 1..18: mol_type = mRNA
agcggggactacatcaag

SEQ ID NO: 199 - RNA, 19 nt, Homo sapiens
  misc_feature 1..19: note = Description of sequences: MUCIN 5BExon 5SPL5B5-10
  source 1..19: mol_type = mRNA
ggggactacatcaaggtca

SEQ ID NO: 200 - RNA, 18 nt, Homo sapiens
  misc_feature 1..18: note = Description of sequences: MUCIN 5BExon 5SPL5B5-11
  source 1..18: mol_type = mRNA
gactacatcaaggtcagc

SEQ ID NO: 201 - RNA, 19 nt, Homo sapiens
  misc_feature 1..19: note = Description of sequences: MUCIN 5BExon 5SPL5B5-12
  source 1..19: mol_type = mRNA
tacatcaaggtcagcatcc

SEQ ID NO: 202 - RNA, 18 nt, Homo sapiens
  misc_feature 1..18: note = Description of sequences: MUCIN 5BExon 5SPL5B5-13
  source 1..18: mol_type = mRNA
atcaaggtcagcatccgg

SEQ ID NO: 203 - RNA, 18 nt, Homo sapiens
  misc_feature 1..18: note = Description of sequences: MUCIN 5BExon 5SPL5B5-14
  source 1..18: mol_type = mRNA
aaggtcagcatccggctg

SEQ ID NO: 204 - RNA, 22 nt, Homo sapiens
  misc_feature 1..22: note = Description of sequences: MUCIN 5BExon 5SPL5B5-15
  source 1..22: mol_type = mRNA
agcatccggctggtgctgacat

SEQ ID NO: 205 - RNA, 19 nt, Homo sapiens
  misc_feature 1..19: note = Description of sequences: MUCIN 5BExon 5SPL5B5-16
  source 1..19: mol_type = mRNA
atccggctggtgctgacat

SEQ ID NO: 206 - RNA, 19 nt, Homo sapiens
  misc_feature 1..19: note = Description of sequences: MUCIN 5BExon 5SPL5B5-17
  source 1..19: mol_type = mRNA
ggctggtgctgacattcct

SEQ ID NO: 207 - RNA, 19 nt, Homo sapiens
  misc_feature 1..19: note = Description of sequences: MUCIN 5BExon 5SPL5B5-18
  source 1..19: mol_type = mRNA
ctggtgctgacattcctgt

SEQ ID NO: 208 - RNA, 19 nt, Homo sapiens
  misc_feature 1..19: note = Description of sequences: MUCIN 5BExon 5SPL5B5-19
  source 1..19: mol_type = mRNA
gtgctgacattcctgtgga

SEQ ID NO: 209 - RNA, 18 nt, Homo sapiens
  misc_feature 1..18: note = Description of sequences: MUCIN 5BExon 5SPL5B5-20
  source 1..18: mol_type = mRNA
ctgacattcctgtggaac

SEQ ID NO: 210 - RNA, 19 nt, Homo sapiens
  misc_feature 1..19: note = Description of sequences: MUCIN 5BExon 5SPL5B5-21
  source 1..19: mol_type = mRNA
cattcctgtggaacggaga

SEQ ID NO: 211 - RNA, 18 nt, Homo sapiens
  misc_feature 1..18: note = Description of sequences: MUCIN 5BExon 5SPL5B5-22
  source 1..18: mol_type = mRNA
ttcctgtggaacggagag

SEQ ID NO: 212 - RNA, 19 nt, Homo sapiens
  misc_feature 1..19: note = Description of sequences: MUCIN 5BExon 5SPL5B5-23
  source 1..19: mol_type = mRNA
ctgtggaacggagaggaca

SEQ ID NO: 213 - RNA, 18 nt, Homo sapiens
  misc_feature 1..18: note = Description of sequences: MUCIN 5BExon 5SPL5B5-24
  source 1..18: mol_type = mRNA
tggaacggagaggacagt

SEQ ID NO: 214 - RNA, 18 nt, Homo sapiens
  misc_feature 1..18: note = Description of sequences: MUCIN 5BExon 5SPL5B5-25
  source 1..18: mol_type = mRNA
aacggagaggacagtgcc

SEQ ID NO: 215 - RNA, 322 nt, Homo sapiens
  source 1..322: mol_type = mRNA
cccccaaacaccatgctgcttccaccgcagcctccaacccggcgcacaacgggcgggtgtgcagcacctggggcagcttccactacaagaccttcgacggcgacgtcttccgcttccccggcctctgcaactacgtgttctccgagcactgcggtgccgcctacgaggattttaacatccagctacgccgcagccaggagtcagcggcccccacgctgagcagggtcctcatgaaggtggatggcgtggtcatccagctgaccaagggctccgtcctggtcaacggccacccgtgagtctgggttctgggatggtgggggcc

SEQ ID NO: 216 - RNA, 175 nt, Homo sapiens
  source 1..175: mol_type = mRNA
ccagcccctcagccctgccttcctccacagggtcctgctgcccttcagccagtctggggtcctcattcagcagagcagcagctacaccaaggtggaggccaggctgggccttgtcctcatgtggaaccacgatgacagcctgctggtgaggctgggtgggggtgtcccggtgtgc

SEQ ID NO: 217 - RNA, 151 nt, Homo sapiens
  source 1..151: mol_type = mRNA
gatgggtgtctgatgtctctccctttgcagctggagctggacaccaaatacgccaacaagacctgtgggctctgtggggacttcaacgggatgcccgtggtcagcgagctcctctcccacagtaaggccccacatcgccctcagccccttc

SEQ ID NO: 218 - RNA, 170 nt, Homo sapiens
  source 1..170: mol_type = mRNA
aggcagagcccgcctctgtgcttgccgcagacaccaagctgacacccatggaattcgggaacctgcagaagatggacgaccccacggaccagtgtcaggaccctgtccctgaacccccgaggaactgctccactggctttgtaagccttggagggaacagagggcccagc

SEQ ID NO: 219 - RNA, 274 nt, Homo sapiens
  source 1..274: mol_type = mRNA
gactcagacgggctgtggcctttgtcctagggcatctgtgaggagctcctgcacggccagctgttctctggctgcgtggccctggtggacgtcggcagctacctggaggcttgcaggcaagacctctgcttctgtgaagacaccgacctgctcagctgcgtctgccacacccttgccgagtactcccggcagtgcacccatgcaggggggttgccccaggactggcggggccctgacttctgccgtgagtgtcccagccccctgtcccccaacc

SEQ ID NO: 220 - RNA, 178 nt, Homo sapiens
  source 1..178: mol_type = mRNA
gcccgtcataggcctgcctgacccctgcagggacggtgcttgacgacatcggccagaccggctgtgtccctgtgtcaaagtgtgcctgcgtctacaacggggctgcctatgccccaggggccacctactccacagactgcaccaactggtaggtcccagcccccctccaggccaccaa

SEQ ID NO: 221 - RNA, 199 nt, Homo sapiens
  source 1..199: mol_type = mRNA
cacccacgtggcaccatctcttgctctcagcacctgctccggaggccggtggagctgccaggaggttccatgcccgggtacctgctctgtgcttggaggtgcccacttctcaacgtttgacgggaagcaatacacggtgcacggcgactgcagctatgtgctgaccaaggtacggcctggctgcctggggtgctcgccg

SEQ ID NO: 222 - RNA, 130 nt, Homo sapiens
  source 1..130: mol_type = mRNA
gcgctcacacatctgtctggctgccctcaggtggtggtgatcaaggccagtggggaagtgttcctgaaccagatctacacccagctgcccatctctgcaggtgagggcagtggcttcttccccaccccgg

SEQ ID NO: 223 - RNA, 155 nt, Homo sapiens
  source 1..155: mol_type = mRNA
atcctaaccctatccctcctctgtccacagagaagtatgctcagcactggtgctcgcagctgaccgatgccgacggccccttcggccggtgccatgctgccgtgaagccgggaacctactactcggtaacatctgccgcctcttggcccggtggg

SEQ ID NO: 224 - RNA, 187 nt, Homo sapiens
  source 1..187: mol_type = mRNA
ctgatgccccgatgacccccttccctgcagaactgcatgtttgacacctgcaactgtgagcggagcgaggactgcctgtgcgccgcgctgtcctcctacgtgcacgcctgtgccgccaagggcgtgcagctcggcggctggagggacggcgtctgcagtgagtgcctgccaagcccagcccctttcc

SEQ ID NO: 225 - RNA, 316 nt, Homo sapiens
  source 1..316: mol_type = mRNA
tgagaatcccctcttcctggcatcccgcagcgaagcctatgaccacttgccccaagtcaatgacgtaccactaccatgtcagcacctgccagcccacctgccgctccctgagcgagggggacatcacctgcagtgttggcttcatccccgtggatggctgcatctgtcccaagggcaccttcctggacgacacgggcaagtgtgtgcaggccagcaactgtccctgctaccacagaggctccatgatccccaatggggagtcggtgcacgacagcggggctatctggtaagagctcccgctgtggactggggggtc

SEQ ID NO: 226 - RNA, 113 nt, Homo sapiens
  source 1..113: mol_type = mRNA
gctgaggctctgaccaccatctcctcacagcacctgcacacatgggaagctgagctgcatcggaggccaagcccccgccccaggtgagtgccagaaaggaggcactgtggccc

SEQ ID NO: 227 - RNA, 161 nt, Homo sapiens
  source 1..161: mol_type = mRNA
ctggccccctgacggcccctccctccccagtgtgtgctgcgcccatggtgttctttgactgccgaaatgccacgcccggggacacaggggctggctgtcagaagagctgccacacactggacatgacctgtgtaagtccctgaggactccccaatgacaga

SEQ ID NO: 228 - RNA, 212 nt, Homo sapiens
  source 1..212: mol_type = mRNA
atcactcagtggtgtctgctggccctgcagtacagcccccagtgtgtgcctggctgcgtgtgccccgacgggctggtggcggacggcgagggcggctgcatcactgcggaggactgcccctgcgtgcacaatgaggccagctaccgggccggccagaccatccgggtgggctgcaacacctggtatgccgggggctcaaagcccatgggggg

SEQ ID NO: 229 - RNA, 199 nt, Homo sapiens
  source 1..199: mol_type = mRNA
gctctagcctgacccccagatgtcccccagcacctgtgacagcaggatgtggcggtgcacagatgacccctgcctggccacctgcgccgtgtacggggacggccactacctcaccttcgacggacagagctacagcttcaacggagactgcgagtacacgctggtgcaggtgagccggcgcgtttggggtcctcacggc

SEQ ID NO: 230 - RNA, 217 nt, Homo sapiens
  source 1..217: mol_type = mRNA
ccctggaacctgaagccccgtctccctcaggtggagccggccaggtactacgaggcctgcgtgaacgacgcgtgcgcctgcgactccgggggtgactgcgagtgcttctgcacggctgtggccgcctacgcccaggcctgccatgaagtaggcctgtgtgtgtcctggcggaccccgagcatctgccgtgagtgcgagtgggcacctggggaagaac

SEQ ID NO: 231 - RNA, 223 nt, Homo sapiens
  source 1..223: mol_type = mRNA
ggttgtgactctggcctctttggcccacaggctgctaccccaagtgcccaccagaggctcccatctttgatgaggacaagatgcagtgtgtggccacctgcccaaccccgcctctgccaccacggtgccacgtccatgggaagtcctaccggccaggtgcagtggtgccctcggacaagaactgccagtcctggtgagtcctttggggggaggaatatggagc

SEQ ID NO: 232 - RNA, 104 nt, Homo sapiens
  source 1..104: mol_type = mRNA
catcggcctgcccttcttccttgtctccagcctttgtacggagcgcggcgtggagtgcacctacaaagctgagggtgagcggccggcagcccctggggctgggg

SEQ ID NO: 233 - RNA, 322 nt, Homo sapiens
  source 1..322: mol_type = mRNA
gggatgggcctcatcccgcgctccccacagccctgaacccggcgcacaatgggcgggtgtgcagcacctggggtgacttccactacaagaccttcgacggcgacgtcttccgcttccctggcctttgcaactacgtgttctctgagcactgccgcgccgcctacgaggacttcaacgtccagctacgccgaggcctagtgggctccaggcctgtggtcacccgtgttgtcatcaaggcccaggggctggtgctggaggcgtccaacggctccgtcctcatcaatgggcagcggtgagccggccaccctggggaggggcgagg

SEQ ID NO: 234 - RNA, 175 nt, Homo sapiens
  source 1..175: mol_type = mRNA
gcccagggagagaccccgctgtctgcgcagggaggagctgccttacagccgcactggcctcctggtggagcagagcggggactacatcaaggtcagcatccggctggtgctgacattcctgtggaacggagaggacagtgccctggtgaggaagccccctcgccccttgcccctt

SEQ ID NO: 235 - RNA, 151 nt, Homo sapiens
  source 1..151: mol_type = mRNA
gaggctggagctgcccctccccactctcagctggagctggatcccaaatacgccaaccagacctgtggcctgtgtggggacttcaacggcctcccggccttcaacgagttctatgcccacagtgagtgccacctgggtgagggggcggtga

SEQ ID NO: 236 - RNA, 167 nt, Homo sapiens
  source 1..167: mol_type = mRNA
gccaccacacccctgctttcttcccggcagacgccaggctgaccccgctccagtttgggaacctgcagaagttggatgggcccacggagcagtgcccggacccgctgcccttgccggccggcaactgcacggacgaggtgagtcccccgccacccccagctcctggg

SEQ ID NO: 237 - RNA, 262 nt, Homo sapiens
  source 1..262: mol_type = mRNA
gtgcccagcctggcccactgtgctccccaggagggcatctgccaccgcaccctgctggggccggcctttgcggagtgccacgcactggtggacagcactgcgtacctggccgcctgcgcccaggacctgtgccgctgccccacctgcccgtgtgccacctttgtggaatactcacgccagtgcgcccacgcggggggccagccgcggaactggaggtgccctgagctctgccgtgagtgctcccagggccttcgccagggat

SEQ ID NO: 238 - RNA, 178 nt, Homo sapiens
  source 1..178: mol_type = mRNA
gccggccctgcctcacgccgcgccccacaggcacggtgctggatgacatcacgcactctggctgcctgcccctcgggcagtgcccctgcacccacggcggccgcacctacagcccgggcacctccttcaacaccacctgcagctcctggtacttatgagcccaccagcctccgcctgg

SEQ ID NO: 239 - RNA, 199 nt, Homo sapiens
  source 1..199: mol_type = mRNA
gccggttctgctcacggcctccctccccagcacctgctccggggggctatggcagtgccaggacctgccgtgccctggcacctgctctgtgcagggcggggcccacatctccacctatgatgagaaactctacgacctgcatggtgactgcagctacgttctgtccaaggtctgggcttggggccgggtcttcagacac

SEQ ID NO: 240 - RNA, 130 nt, Homo sapiens
  source 1..130: mol_type = mRNA
agctgacctcccgcccgcctccttccgcaggccatccgggtccaagcggacggcggcgtgttcctcaactccatctacacgcagctgcccctgtcggcaggtatgtggctctcccaggacggccgggctg

SEQ ID NO: 241 - RNA, 155 nt, Homo sapiens
  source 1..155: mol_type = mRNA
cgtggagatgaggtcaggtcttccccacagagaactacgcccggcactggtgctcgcgcctgaccgatcccaacagtgccttctcgcgctgccactccatcatcaaccccaagcccttccactcggtgagaggctgaggccagacccccacgcct

SEQ ID NO: 242 - RNA, 187 nt, Homo sapiens
  source 1..187: mol_type = mRNA
ctgacgccccgatgcctcccacctccgcagaactgcatgtttgacacctgcaactgtgagcggagcgaggactgcctgtgcgccgcgctgtcctcctatgtgcacgcctgtgccgccaagggcgtacagctcagcgactggagggacggcgtctgcagtgagtgcccacgctgggggtgggatgtgt

SEQ ID NO: 243 - RNA, 316 nt, Homo sapiens
  source 1..316: mol_type = mRNA
acctgtcccccctggccccaccgaccacagccaagtacatgcagaactgccccaagtcccagcgctacgcctacgtggtggatgcctgccagcccacttgccgcggcctgagtgaggccgacgtcacctgcagcgtttccttcgtgcctgtggacggctgcacctgccccgcgggcaccttcctcaatgacgcgggcgcctgtgtgcccgcccaggagtgcccctgctacgctcacggcaccgtgctggctcctggagaggtggtgcacgacgagggcgccgtgtggtaagggtctggggggaaagcaggcccccc

SEQ ID NO: 244 - RNA, 116 nt, Homo sapiens
  source 1..116: mol_type = mRNA
gatccaggctgtgccgtctgtctcttgtagttcatgtacgggtgggaagctaagctgcctgggagcctctctgcagaaaagcacaggtaagtgccacccctgccctgccctgccct

SEQ ID NO: 245 - RNA, 161 nt, Homo sapiens
  source 1..161: mol_type = mRNA
aggacccctcccaccaagctctgtccccagggtgtgcagcccccatggtgtacctggactgcagcaacagctcggcgggcacccctggggccgagtgcctccggagctgccacacgctggacgtgggctgtgtgagttccatgcttcagggaggggtgggc

SEQ ID NO: 246 - RNA, 212 nt, Homo sapiens
  source 1..212: mol_type = mRNA
ccctgaccggtacctgcctgggccccacagttcagcacacactgcgtgtccggctgtgtctgtcccccggggctggtgtcggatgggagtgggggctgcattgccgaggaggactgcccctgtgtgcacaacgaggccacctacaagcctggagagaccatcagggtcgactgcaacacctggtgggtcgtgagtctctcggaggcagcagg

SEQ ID NO: 247 - RNA, 199 nt, Homo sapiens
  source 1..199: mol_type = mRNA
gtgagcaggcaccattgtggccccttgcagcacctgcaggaaccggaggtgggagtgcagccaccggctctgcctgggcacctgcgtggcctacggggatggccacttcatcacctttgatggcgatcgctacagctttgaaggcagctgcgagtacatcttggcccaggtacgccgccccctcgcccactcctgcagg

SEQ ID NO: 248 - RNA, 217 nt, Homo sapiens
  source 1..217: mol_type = mRNA
ggctgagctgcaccttggcctcacccgcaggttgactccaccaagtactacgaggcctgcgtgaacgacgcgtgtgcctgcgactcgggtggcgactgcgagtgtttctgcacggctgtggctgcctacgcccaggcctgccacgacgcgggcctgtgtgtgtcctggcggactccggacacctgccgtgagtcgggctctgtccgtggtgctgaag

SEQ ID NO: 249 - RNA, 205 nt, Homo sapiens
  source 1..205: mol_type = mRNA
tgagtcttctgctcaccctgccggccctaggctgctacccgaagtgcccacccagccagcccttcttcaatgaggaccagatgaagtgcgtggcccagtgtggctgctacgacaaggacggaaactactatgacgtcggtgcaagggtccccacagcggagaactgccagagctggtgagggggtgggaagcgggtggcgctggg

SEQ ID NO: 250 - RNA, 104 nt, Homo sapiens
  source 1..104: mol_type = mRNA
gccctcagctcgcctctcccccacccctagtaactgcacacccagtggcatccagtgcgctcacagccttgagggtaaggaagggccggggggttagtgggccg

SEQ ID NO: 251 - RNA, 95 nt, Homo sapiens
  source 1..95: mol_type = mRNA
agaagtatgctcagcactggtgctcgcagctgaccgatgccgacggccccttcggccggtgccatgctgccgtgaagccgggaacctactactcg

SEQ ID NO: 252 - RNA, 127 nt, Homo sapiens
  source 1..127: mol_type = mRNA
aactgcatgtttgacacctgcaactgtgagcggagcgaggactgcctgtgcgccgcgctgtcctcctacgtgcacgcctgtgccgccaagggcgtgcagctcggcggctggagggacggcgtctgca

SEQ ID NO: 253 - RNA, 256 nt, Homo sapiens
  source 1..256: mol_type = mRNA
cgaagcctatgaccacttgccccaagtcaatgacgtaccactaccatgtcagcacctgccagcccacctgccgctccctgagcgagggggacatcacctgcagtgttggcttcatccccgtggatggctgcatctgtcccaagggcaccttcctggacgacacgggcaagtgtgtgcaggccagcaactgtccctgctaccacagaggctccatgatccccaatggggagtcggtgcacgacagcggggctatctg

SEQ ID NO: 254 - RNA, 53 nt, Homo sapiens
  source 1..53: mol_type = mRNA
cacctgcacacatgggaagctgagctgcatcggaggccaagcccccgccccag

SEQ ID NO: 255 - RNA, 101 nt, Homo sapiens
  source 1..101: mol_type = mRNA
tgtgtgctgcgcccatggtgttctttgactgccgaaatgccacgcccggggacacaggggctggctgtcagaagagctgccacacactggacatgacctgt

SEQ ID NO: 256 - RNA, 152 nt, Homo sapiens
  source 1..152: mol_type = mRNA
tacagcccccagtgtgtgcctggctgcgtgtgccccgacgggctggtggcggacggcgagggcggctgcatcactgcggaggactgcccctgcgtgcacaatgaggccagctaccgggccggccagaccatccgggtgggctgcaacacctg

SEQ ID NO: 257 - RNA, 139 nt, Homo sapiens
  source 1..139: mol_type = mRNA
cacctgtgacagcaggatgtggcggtgcacagatgacccctgcctggccacctgcgccgtgtacggggacggccactacctcaccttcgacggacagagctacagcttcaacggagactgcgagtacacgctggtgcag

SEQ ID NO: 258 - RNA, 157 nt, Homo sapiens
  source 1..157: mol_type = mRNA
gtggagccggccaggtactacgaggcctgcgtgaacgacgcgtgcgcctgcgactccgggggtgactgcgagtgcttctgcacggctgtggccgcctacgcccaggcctgccatgaagtaggcctgtgtgtgtcctggcggaccccgagcatctgcc

SEQ ID NO: 259 - RNA, 163 nt, Homo sapiens
  source 1..163: mol_type = mRNA
gctgctaccccaagtgcccaccagaggctcccatctttgatgaggacaagatgcagtgtgtggccacctgcccaaccccgcctctgccaccacggtgccacgtccatgggaagtcctaccggccaggtgcagtggtgccctcggacaagaactgccagtcctg

SEQ ID NO: 260 - RNA, 44 nt, Homo sapiens
  source 1..44: mol_type = mRNA
cctttgtacggagcgcggcgtggagtgcacctacaaagctgagg

SEQ ID NO: 261 - RNA, 95 nt, Homo sapiens
  source 1..95: mol_type = mRNA
agaactacgcccggcactggtgctcgcgcctgaccgatcccaacagtgccttctcgcgctgccactccatcatcaaccccaagcccttccactcg

SEQ ID NO: 262 - RNA, 127 nt, Homo sapiens
  source 1..127: mol_type = mRNA
aactgcatgtttgacacctgcaactgtgagcggagcgaggactgcctgtgcgccgcgctgtcctcctatgtgcacgcctgtgccgccaagggcgtacagctcagcgactggagggacggcgtctgca

SEQ ID NO: 263 - RNA, 256 nt, Homo sapiens
  source 1..256: mol_type = mRNA
ccaagtacatgcagaactgccccaagtcccagcgctacgcctacgtggtggatgcctgccagcccacttgccgcggcctgagtgaggccgacgtcacctgcagcgtttccttcgtgcctgtggacggctgcacctgccccgcgggcaccttcctcaatgacgcgggcgcctgtgtgcccgcccaggagtgcccctgctacgctcacggcaccgtgctggctcctggagaggtggtgcacgacgagggcgccgtgtg

SEQ ID NO: 264 - RNA, 56 nt, Homo sapiens
  source 1..56: mol_type = mRNA
ttcatgtacgggtgggaagctaagctgcctgggagcctctctgcagaaaagcacag

SEQ ID NO: 265 - RNA, 101 nt, Homo sapiens
  source 1..101: mol_type = mRNA
ggtgtgcagcccccatggtgtacctggactgcagcaacagctcggcgggcacccctggggccgagtgcctccggagctgccacacgctggacgtgggctgt

SEQ ID NO: 266 - RNA, 152 nt, Homo sapiens
  source 1..152: mol_type = mRNA
ttcagcacacactgcgtgtccggctgtgtctgtcccccggggctggtgtcggatgggagtgggggctgcattgccgaggaggactgcccctgtgtgcacaacgaggccacctacaagcctggagagaccatcagggtcgactgcaacacctg

SEQ ID NO: 267 - RNA, 139 nt, Homo sapiens
  source 1..139: mol_type = mRNA
cacctgcaggaaccggaggtgggagtgcagccaccggctctgcctgggcacctgcgtggcctacggggatggccacttcatcacctttgatggcgatcgctacagctttgaaggcagctgcgagtacatcttggcccag

SEQ ID NO: 268 - RNA, 157 nt, Homo sapiens
  source 1..157: mol_type = mRNA
gttgactccaccaagtactacgaggcctgcgtgaacgacgcgtgtgcctgcgactcgggtggcgactgcgagtgtttctgcacggctgtggctgcctacgcccaggcctgccacgacgcgggcctgtgtgtgtcctggcggactccggacacctgcc

SEQ ID NO: 269 - RNA, 145 nt, Homo sapiens
  source 1..145: mol_type = mRNA
gctgctacccgaagtgcccacccagccagcccttcttcaatgaggaccagatgaagtgcgtggcccagtgtggctgctacgacaaggacggaaactactatgacgtcggtgcaagggtccccacagcggagaactgccagagctg

SEQ ID NO: 270 - RNA, 44 nt, Homo sapiens
  source 1..44: mol_type = mRNA
taactgcacacccagtggcatccagtgcgctcacagccttgagg

SEQ ID NO: 271 - RNA, 10371 nt, Homo sapiens
  source 1..10371: mol_type = mRNA
tcgtgagctccacgcacacccccagcaatggcccaagcagcgcgcacacaggccctccgagcagcgcctggcccaccacagcaggcacttctcccaggacgaggctgcccacagcctctgcctcactgccgccggtctgtggggaaaagtgcctgtggtcgccatggatggatgtcagccgccctggacggggcacggacagcggtgacttcgacacactggagaacctccgcgcccatgggtaccgggtgtgcgaatcacccaggtcggtggagtgccgagctgaggacgcccccggagtgccgctccgagccctggggcagcgtgtgcagtgcagcccggatgtggggctgacctgtcgtaacagggagcaggcatcggggctctgctacaactaccagatcagggtccagtgctgcacgcccctaccctgctccacctctagcagtccagcccagaccactcctccaactacctccaagaccactgaaacccgggcctcaggctcctcagctcccagcagcacacctggcaccgtgtctctctctacagccaggacgacacctgccccaggtaccgctacctctgtcaaaaaaactttctcaactcccagccctccgccagtgccggcaacatcaacatcatccatgtcgaccacggccccggggacctctgtggtctccagcaagcccacccccacggagcccagcacatcctcctgcctgcaggagctttgcacctggaccgagtggatcgatggcagctaccctgctcctggaataaatggtggagattttgacacatttcaaaatttgagagacgaaggatacacattctgtgaaagtcctcgaagcgtgcagtgccgggcagagagcttccccaacacgccgctggcagacctggggcaggacgtcatctgcagccacacagaggggctgatttgcctgaacaagaaccagctcccacccatctgctacaactatgagatccgcatccagtgttgcgagacggtgaacgtgtgcagagacatcaccagactgccaaagaccgtcgcaacgacacggccgactccacatccaaccggagctcagacccagaccaccttcaccacacacatgccctcggcctccacagagcaacccacggcaacctccaggggtgggcccacagcaaccagcgtcacacagggcacccacaccacactagtcaccagaaactgtcatccccggtgcacctggacaaagtggttcgacgtggacttcccgtcccccggaccccatggtggagacaaggaaacctacaacaacatcatcaggagtggggaaaaaatctgccgccgacctgaggagatcaccaggctccagtgccgagccaagagccacccagaggtgagcatcgaacacctgggccaggtggtgcagtgcagccgggaagagggcctggtgtgccggaaccaggaccagcagggacccttcaagatgtgcctcaactacgaggtgcgtgtgctctgctgcgagacccccagaggctgccacatgacctccacacctggctccacctctagcagtccagcccagaccactccttcaacaacctccaagaccactgaaacccaggcctcaggctcctcagcccccagcagcacacctggcaccgtgtctctctctacagccaggacgacacctgccccaggtaccgctacctctgtcaaaaaaactttctcaactcccagccctccgccagtgccggcaacatcaacatcatccatgtcgaccacggccccggggacctctgtggtctccagcaagcccacccccacggagcccagcacatcctcctgcctgcaggagctttgcacctggaccgagtggattgatggcagctaccctgctcctggaataaatggtggagattttgacacatttcaaaatttgagagacgaaggatacacattctgtgaaagtcctcgaagcgtgcagtgccgggcagagagcttccccaacacgccgctggcagacctggggcaggacgtcatctgcagccacacagaggggctgatttgcctgaacaagaaccagctcccacccatctgctacaactatgagatccgcatccagtgttgcgagacggtgaacgtgtgcagagacatcaccagaccgccaaagaccgtcgcaacgacacggccgactccacatccaaccggagctcagacccagaccaccttcaccacacacatgccctcggcctccacagagcaacccacggcaacctccaggggtgggcccacagcaaccagcgtcacacagggcacccacaccacaccagtcaccagaaactgtcatccccggtgcacctggacaacgtggttcgacgtggacttcccgtcccccggaccccatggtggagacaaggaaacctacaacaacatcatcaggagtggggaaaaaatctgccgccgacctgaggagatcaccaggctccagtgccgagccaagagccacccagaggtgagcatcgaacacctgggccaggtggtgcagtgcagccgggaagagggcctggtgtgccggaaccaggaccagcagggacccttcaagatgtgcctcaactacgaggtgcgtgtgctctgctgcgagacccccaaaggctgccccgtgacctccacacctgtgacagctcctagcacccctagtgggagagccaccagcccaactcagagcacctcctcttggcagaaatccaggacaaccactttggtgacaaccagcacaacctccactccacagaccagtacaacctatgcccatacaaccagcacaacctctgctcctacagccagaacaacctctgctcctacaaccagaacaacctctgcctctccagccagcacaacctctggtcctggaaatactcccagccctgttcctaccaccagcacaatctctgctcctacaactagcataacctctgcccctacaaccagcacaacctctgcccctacaagcagcacaacctctggtcctggaactactcccagccctgttcctaccaccagcataacctctgcccctacaaccagcacaacctctgctcctacaaccagcacaacctctgcccgtacaagcagcacaacctctgccactaccaccagcagaatctctggtcctgaaactactcccagccctgttcctaccaccagcacaacctctgccactacaaccagcacaacctcagctcctacaaccagcacaacctctgcccctacaagcagcacaacctccagtccacagaccagcacaacctcggctcctacaaccagcacaacttctggtcctggaactaccccaagccctgttcccacgaccagcacaacctctgcccctacaacaagaacaacttctgctcctaaaagcagcacaacctctgccgctacaaccagcacaacctctggtcctgaaactactcctagacctgttcctaccaccagcacaacctcttctcctacaaccagcacaacctctgctcctacaaccagcacaacctctgcttctacaaccagcacaacctctggtgctggaactactcccagccctgttcccaccaccagcacaacctctgctcctacaaccagcacaacctctgcccctataagcagcacaacctctgccactacaaccagcacaacctctggtcctggaactactcccagccctgttcctaccacgagcacaacctctgctcctacaaccagcacaacctctggtcctggaactactcccagtgctgttcccaccaccagcataacctctgcacctacaaccagcacaaactctgcccctataagcagcacaacctctgccactacaaccagcagaatctctggtcctgaaactactcccagccctgttcctaccgccagcacaacctctgcttctacaactagcacaacctctggtcctggaactactcccagccctgttcctaccaccagcacaatctctgttcctaccaccagcacaacttctgcttctacaaccagcacaacctctgcttctacaaccagcacaacctctggtcctggaactactcccagccctgttcccaccaccagcacaacctctgctcccacaacaagcacaacctctgcccctacaaccagcacaatctcggccccaacaaccagcacaacctctgccactacaaccagcacgacctctgctcctacacccagaagaacctcagcccctacaaccagcacaatctctgcctctaccaccagcacaacctctgcgactacaaccagcacaacctctgctactacaaccagcacaatctctgcccctacaaccagcacaactttgtctcctacaaccagcacaacctctactactataaccagcacaacttctgcccctataagcagcacaacttccacaccacagaccagcacaacttcggctcctacaaccagcacaacttctggtcctggaactacttcaagccctgttcccaccaccagcacaacctctgcccctacaaccagcacaacctctgcccctacaaccagaacaacctctgtccctacaagcagcacaacctccactgctacaaccagcacaacctctggccctggaactactcccagccctgttcccaccaccagtacaacctctgctcctacaaccagaacaacctctgctcctacaaccagcacaacctctgcccctacaaccagcacaacctctgcccctacaagcagcacaacctcagctactacaaccagcacaatctctgttcctacaaccagcacaacttctgttcctggaactactcccagccctgttcctaccaccagcacaatctctgttcctaccaccagcacaacttctgcttctacaaccagcacaacctctggtcctggaactactcccagccctgttcccaccaccagcacaacctctgctcccacaacaagcacaacctctgcccctacaaccagcacaatctcggccccaacaaccagcacaccctctgcccctacaaccagcacaaccttagctcctacaaccagcacaacctctgcccctacaaccagcacaacctctacccctacaagcagcacaacctcctctccacagaccagcacaacctcggcttctaccaccagcataacttctggtcctggaactaccccaagccctgttcccaccaccagcacaacctctgctcctacaaccagcacaacctctgccgctacaaccagcacaatctcggccccaacaaccagcacaacgtctgctcctacaaccagcacaacctctgcctctacagccagcaaaacctctggtcttggaactactcccagccctattcctaccaccagcacaacctctcctcctacaaccagcacaacttctgcctctacagccagcaaaacctctggtcctggaaccactcccagccctgttcccaccaccagcacaatctttgctcctagaaccagcaccacttctgcctctacaaccagcacaacccctggtcctggaaccactcccagccccgttcccaccaccagcacagcctctgtttcaaagaccagcacaagccatgtttccatatccaagacaacccactcccaaccagtcaccagagactgtcatctccggtgcacctggaccaagtggtttgacatagacttcccatcccctggaccccacggcggggacaaggaaacctacaacaacatcatcaggagtggggaaaaaatctgccgccgacctgaggagatcaccaggctccagtgccgagccgagagccacccggaggtgagcattgaacacctgggccaggtggtgcagtgcagccgtgaagagggcctggtgtgccggaaccaggaccagcagggacccttcaagatgtgcctcaactacgaggtgcgtgtgctctgctgcgagacccctaaaggttgccccgtgacctccacacctgtgacagctcctagcacccctagtgggagagccaccagcccaactcagagcacttcctcttggcagaaatccaggacaaccactttggtgacaaccagcacaacctccactccacagaccagcacaacctctgctcctacaaccagcacaacctctgctcccacaaccagcacaacttctgcccctacaaccagcacaacctccactccacagaccagcatatcctctgcccctacaagcagcacaacctcggctcctacaagcagcacaatctctgctcgtacaaccagcataatctctgcccctacaaccagcacaacctcttcccctacaaccagcacaacctctgctactacaaccagcacaacctctgcccctacaagcagcacaacctccactccacagaccagcaaaacctcagctgctacaagcagcacaacctccggttctggaactactcccagccctgttaccaccaccagcacagcctctgtttcaaagaccagcacaagccatgtttctgtatccaagacaacccactcccaaccagtcaccagagactgtcatccccggtgcacctggaccaaatggtttgatgtggactttccatcccctggaccccacggtggggacaaggaaacctacaacaacatcatcaggagtggggaaaaaatctgccgccgacctgaggagatcaccaggctccagtgccgagccaagagccacccggaggtgagcatcgaacacctgggccaggtggtgcagtgcagccgcgaagagggcctggtgtgccggaaccaggaccagcagggacccttcaagatgtgcctcaactacgaggtgcgtgtgctttgctgcgagacccccaaaggctgccccgtgacctccacatctgtgacagctcctagcacccctagtgggagagccaccagcccaactcagagcacctcctcttggcagaaatccaggacaaccactttggtgacaagcagcataacctccactacacagaccagcacaacctctgcccctacaactagcacaacccctgcttctatacccagcacaacctctgccccaacaaccagcacaacctctgctcccacaacgagcacaacttctgcccctacaaccagcacaacctccactccacagaccaccacatcctctgcccctacaagcagcacaacctcggctcctaccaccagcacaatctctgcccctacaaccagcacaatctctgcccctacaaccagcacaacctctgctcccacagccagcacaacgtcagctcctacgagcacttcctcggctcctacaaccaacacaacctctgcccctacaactagcactacctctgctcccataaccagcacaatctctgcccctacaaccagcacaacctccactccacagaccagcacaatctcttcccctacaaccagcacaacctccactccgcagaccagcacaacctcttcccctacaactagcacaacctcagctcctacaaccagcacaacttctgcccctacaaccagcacaacctccactccacagaccagcatatcctctgcccctacaagcagcacaacctctgctcctacagccagcacaatctctgcccctacaaccagcacaacctctttccatacaaccagcacaacctctccccctacaagcagcacaagctccactccacagaccagcaaaacctcagctgctacaagcagcacaacctccggttctggaactactcccagccccgttcccaccaccagcacagcctctgtttcaaagaccagcacaagccatgtttctgtatccaagacaacccactcccaaccagtcaccagagactgtcatccccggtgcacctggaccaagtggtttgacgtggactttccatcccctggaccccacggtggggacaaggaaacctacaacaacatcatcaggagtggggaaaaaatctgccgccgacctgaggagatcaccaggctccagtgccgagccgagagccacccggaggtgagcatcgaacacctgggccaggtggtgcagtgcagccgggaagagggcctggtgtgccggaaccaggaccagcagggacccttcaagatgtgcctcaactacgaggtgcgtgtgctctgctgcgagacccccaaaggctgccccgtgacctccacacctgtgacagctcctagcacccctagtgggagagccaccagcccaactcagagcacttcctcttggcagaaatccaggacaaccactttggtgacaaccagcacaacctccactccacagaccagcacaacctctgcccctacaaccagcacaatccctgcttctacacccagcacaacctctgcccctacaaccagcacaacctctgcccctacaaccagcacgacctcagctcctacacacagaacgacttctggtcctacaaccagcacaaccttggctcctacaaccagcacaacctctgctccaacaaccagcacaaactctgctcctacaaccagcacaatctctgcctctacaaccagcacaatctctgcccctacaaccagcacaatctcttcccctacaagcagcacaacctccactccacagaccagcaaaacctcagctgctacaagcagcacaacctccggttctggaactactccaagccctgttcccaccaccagcacaacctctgcctctacaaccagcacaacttctgctcctacaaccagcacaacctctggtcctggaactactccaagccctgttcccagcaccagtacaacctctgctgctacaaccagcacaacctctgctcctacaaccagaacaacatctgctcctacaagcagcatgacctctggtcctggaactactcccagccctgttcccaccaccagcacaacctctgctcctacaactagcacaacctctggtcctggaactactcccagccctgttcccaccaccagcacaacctctgctcctataaccagcacaacctctggtcctggaagtactcccagccctgttcccaccaccagcacaacctctgctcctacaaccagcacaacctctgcctctacagccagcacaacctctggtcctggaactactcccagccctgttcccaccaccagcacaacctctgctcctacaaccagaacaacctctgcctctacagccagcacaacctctggtcctggaagtactcccagccctgttcccaccaccagcacaacctctgctcctacaaccagaacaacccctgcctctacagccagcacaacctctggtcctggaactactcccagccctgttcccaccacaagcacaacctctgcttctacaaccagcacaatctctctccctacaaccagcacaacctctgctcctataaccagcatgacctctggtcctggaactactcccagccctgttcccaccaccagcacaacctctgctcctacaaccagcacaacctctgcctctacagccagcacaacctctggtcctggaactactcccagccctgttcccaccaccagcacaacctctgctcctacaaccagcacaacctctgcctctacagccagcacaacctctggtcctggaacttctctcagccctgttcccaccacgagcacaacctctgctcctacaactagcacaacctctggtcctggaactactcccagccctgttcccaccaccagcacaacctctgctcctacaaccagcacgacctctggtcctggaactactcccagccccgttcccaccaccagcacaacccctgtttcaaagaccagcacaagccatctttctgtatccaagacaacccactcccaaccagtcaccagtgactgtcatcctctgtgcgcctggacaaagtggttcgacgtggacttcccatcccctggaccccacggcggggacaaggaaacctacaacaacatcatcaggagtggggaaaaaatctgccgccgacctgaggagatcaccaggctccagtgccgagccgagagccacccggaggtgaacattgaacacctgggtcaggtggtgcagtgcagccgtgaagagggcctggtgtgccggaaccaggaccagcagggacccttcaagatgtgcctcaactacgaggtgcgcgtgctctgctgcgagacccccagaggctgcccggtgacctctgtgaccccatatgggacttctcctaccaatgctctgtatccttccctgtctacttccatggtatccgcctccgtggcatccacctctgtggcatccagctctgtggcatccagctctgtggcttactccacccaaacctgcttctgcaacgtggctgaccggctctaccctgcag

SEQ ID NO: 272 - RNA, 10431 nt, Homo sapiens
  source 1..10431: mol_type = mRNA
atgctcagctgccttctcttctgcccacagtcgtgagctccacgcacacccccagcaatggcccaagcagcgcgcacacaggccctccgagcagcgcctggcccaccacagcaggcacttctcccaggacgaggctgcccacagcctctgcctcactgccgccggtctgtggggaaaagtgcctgtggtcgccatggatggatgtcagccgccctggacggggcacggacagcggtgacttcgacacactggagaacctccgcgcccatgggtaccgggtgtgcgaatcacccaggtcggtggagtgccgagctgaggacgcccccggagtgccgctccgagccctggggcagcgtgtgcagtgcagcccggatgtggggctgacctgtcgtaacagggagcaggcatcggggctctgctacaactaccagatcagggtccagtgctgcacgcccctaccctgctccacctctagcagtccagcccagaccactcctccaactacctccaagaccactgaaacccgggcctcaggctcctcagctcccagcagcacacctggcaccgtgtctctctctacagccaggacgacacctgccccaggtaccgctacctctgtcaaaaaaactttctcaactcccagccctccgccagtgccggcaacatcaacatcatccatgtcgaccacggccccggggacctctgtggtctccagcaagcccacccccacggagcccagcacatcctcctgcctgcaggagctttgcacctggaccgagtggatcgatggcagctaccctgctcctggaataaatggtggagattttgacacatttcaaaatttgagagacgaaggatacacattctgtgaaagtcctcgaagcgtgcagtgccgggcagagagcttccccaacacgccgctggcagacctggggcaggacgtcatctgcagccacacagaggggctgatttgcctgaacaagaaccagctcccacccatctgctacaactatgagatccgcatccagtgttgcgagacggtgaacgtgtgcagagacatcaccagactgccaaagaccgtcgcaacgacacggccgactccacatccaaccggagctcagacccagaccaccttcaccacacacatgccctcggcctccacagagcaacccacggcaacctccaggggtgggcccacagcaaccagcgtcacacagggcacccacaccacactagtcaccagaaactgtcatccccggtgcacctggacaaagtggttcgacgtggacttcccgtcccccggaccccatggtggagacaaggaaacctacaacaacatcatcaggagtggggaaaaaatctgccgccgacctgaggagatcaccaggctccagtgccgagccaagagccacccagaggtgagcatcgaacacctgggccaggtggtgcagtgcagccgggaagagggcctggtgtgccggaaccaggaccagcagggacccttcaagatgtgcctcaactacgaggtgcgtgtgctctgctgcgagacccccagaggctgccacatgacctccacacctggctccacctctagcagtccagcccagaccactccttcaacaacctccaagaccactgaaacccaggcctcaggctcctcagcccccagcagcacacctggcaccgtgtctctctctacagccaggacgacacctgccccaggtaccgctacctctgtcaaaaaaactttctcaactcccagccctccgccagtgccggcaacatcaacatcatccatgtcgaccacggccccggggacctctgtggtctccagcaagcccacccccacggagcccagcacatcctcctgcctgcaggagctttgcacctggaccgagtggattgatggcagctaccctgctcctggaataaatggtggagattttgacacatttcaaaatttgagagacgaaggatacacattctgtgaaagtcctcgaagcgtgcagtgccgggcagagagcttccccaacacgccgctggcagacctggggcaggacgtcatctgcagccacacagaggggctgatttgcctgaacaagaaccagctcccacccatctgctacaactatgagatccgcatccagtgttgcgagacggtgaacgtgtgcagagacatcaccagaccgccaaagaccgtcgcaacgacacggccgactccacatccaaccggagctcagacccagaccaccttcaccacacacatgccctcggcctccacagagcaacccacggcaacctccaggggtgggcccacagcaaccagcgtcacacagggcacccacaccacaccagtcaccagaaactgtcatccccggtgcacctggacaacgtggttcgacgtggacttcccgtcccccggaccccatggtggagacaaggaaacctacaacaacatcatcaggagtggggaaaaaatctgccgccgacctgaggagatcaccaggctccagtgccgagccaagagccacccagaggtgagcatcgaacacctgggccaggtggtgcagtgcagccgggaagagggcctggtgtgccggaaccaggaccagcagggacccttcaagatgtgcctcaactacgaggtgcgtgtgctctgctgcgagacccccaaaggctgccccgtgacctccacacctgtgacagctcctagcacccctagtgggagagccaccagcccaactcagagcacctcctcttggcagaaatccaggacaaccactttggtgacaaccagcacaacctccactccacagaccagtacaacctatgcccatacaaccagcacaacctctgctcctacagccagaacaacctctgctcctacaaccagaacaacctctgcctctccagccagcacaacctctggtcctggaaatactcccagccctgttcctaccaccagcacaatctctgctcctacaactagcataacctctgcccctacaaccagcacaacctctgcccctacaagcagcacaacctctggtcctggaactactcccagccctgttcctaccaccagcataacctctgcccctacaaccagcacaacctctgctcctacaaccagcacaacctctgcccgtacaagcagcacaacctctgccactaccaccagcagaatctctggtcctgaaactactcccagccctgttcctaccaccagcacaacctctgccactacaaccagcacaacctcagctcctacaaccagcacaacctctgcccctacaagcagcacaacctccagtccacagaccagcacaacctcggctcctacaaccagcacaacttctggtcctggaactaccccaagccctgttcccacgaccagcacaacctctgcccctacaacaagaacaacttctgctcctaaaagcagcacaacctctgccgctacaaccagcacaacctctggtcctgaaactactcctagacctgttcctaccaccagcacaacctcttctcctacaaccagcacaacctctgctcctacaaccagcacaacctctgcttctacaaccagcacaacctctggtgctggaactactcccagccctgttcccaccaccagcacaacctctgctcctacaaccagcacaacctctgcccctataagcagcacaacctctgccactacaaccagcacaacctctggtcctggaactactcccagccctgttcctaccacgagcacaacctctgctcctacaaccagcacaacctctggtcctggaactactcccagtgctgttcccaccaccagcataacctctgcacctacaaccagcacaaactctgcccctataagcagcacaacctctgccactacaaccagcagaatctctggtcctgaaactactcccagccctgttcctaccgccagcacaacctctgcttctacaactagcacaacctctggtcctggaactactcccagccctgttcctaccaccagcacaatctctgttcctaccaccagcacaacttctgcttctacaaccagcacaacctctgcttctacaaccagcacaacctctggtcctggaactactcccagccctgttcccaccaccagcacaacctctgctcccacaacaagcacaacctctgcccctacaaccagcacaatctcggccccaacaaccagcacaacctctgccactacaaccagcacgacctctgctcctacacccagaagaacctcagcccctacaaccagcacaatctctgcctctaccaccagcacaacctctgcgactacaaccagcacaacctctgctactacaaccagcacaatctctgcccctacaaccagcacaactttgtctcctacaaccagcacaacctctactactataaccagcacaacttctgcccctataagcagcacaacttccacaccacagaccagcacaacttcggctcctacaaccagcacaacttctggtcctggaactacttcaagccctgttcccaccaccagcacaacctctgcccctacaaccagcacaacctctgcccctacaaccagaacaacctctgtccctacaagcagcacaacctccactgctacaaccagcacaacctctggccctggaactactcccagccctgttcccaccaccagtacaacctctgctcctacaaccagaacaacctctgctcctacaaccagcacaacctctgcccctacaaccagcacaacctctgcccctacaagcagcacaacctcagctactacaaccagcacaatctctgttcctacaaccagcacaacttctgttcctggaactactcccagccctgttcctaccaccagcacaatctctgttcctaccaccagcacaacttctgcttctacaaccagcacaacctctggtcctggaactactcccagccctgttcccaccaccagcacaacctctgctcccacaacaagcacaacctctgcccctacaaccagcacaatctcggccccaacaaccagcacaccctctgcccctacaaccagcacaaccttagctcctacaaccagcacaacctctgcccctacaaccagcacaacctctacccctacaagcagcacaacctcctctccacagaccagcacaacctcggcttctaccaccagcataacttctggtcctggaactaccccaagccctgttcccaccaccagcacaacctctgctcctacaaccagcacaacctctgccgctacaaccagcacaatctcggccccaacaaccagcacaacgtctgctcctacaaccagcacaacctctgcctctacagccagcaaaacctctggtcttggaactactcccagccctattcctaccaccagcacaacctctcctcctacaaccagcacaacttctgcctctacagccagcaaaacctctggtcctggaaccactcccagccctgttcccaccaccagcacaatctttgctcctagaaccagcaccacttctgcctctacaaccagcacaacccctggtcctggaaccactcccagccccgttcccaccaccagcacagcctctgtttcaaagaccagcacaagccatgtttccatatccaagacaacccactcccaaccagtcaccagagactgtcatctccggtgcacctggaccaagtggtttgacatagacttcccatcccctggaccccacggcggggacaaggaaacctacaacaacatcatcaggagtggggaaaaaatctgccgccgacctgaggagatcaccaggctccagtgccgagccgagagccacccggaggtgagcattgaacacctgggccaggtggtgcagtgcagccgtgaagagggcctggtgtgccggaaccaggaccagcagggacccttcaagatgtgcctcaactacgaggtgcgtgtgctctgctgcgagacccctaaaggttgccccgtgacctccacacctgtgacagctcctagcacccctagtgggagagccaccagcccaactcagagcacttcctcttggcagaaatccaggacaaccactttggtgacaaccagcacaacctccactccacagaccagcacaacctctgctcctacaaccagcacaacctctgctcccacaaccagcacaacttctgcccctacaaccagcacaacctccactccacagaccagcatatcctctgcccctacaagcagcacaacctcggctcctacaagcagcacaatctctgctcgtacaaccagcataatctctgcccctacaaccagcacaacctcttcccctacaaccagcacaacctctgctactacaaccagcacaacctctgcccctacaagcagcacaacctccactccacagaccagcaaaacctcagctgctacaagcagcacaacctccggttctggaactactcccagccctgttaccaccaccagcacagcctctgtttcaaagaccagcacaagccatgtttctgtatccaagacaacccactcccaaccagtcaccagagactgtcatccccggtgcacctggaccaaatggtttgatgtggactttccatcccctggaccccacggtggggacaaggaaacctacaacaacatcatcaggagtggggaaaaaatctgccgccgacctgaggagatcaccaggctccagtgccgagccaagagccacccggaggtgagcatcgaacacctgggccaggtggtgcagtgcagccgcgaagagggcctggtgtgccggaaccaggaccagcagggacccttcaagatgtgcctcaactacgaggtgcgtgtgctttgctgcgagacccccaaaggctgccccgtgacctccacatctgtgacagctcctagcacccctagtgggagagccaccagcccaactcagagcacctcctcttggcagaaatccaggacaaccactttggtgacaagcagcataacctccactacacagaccagcacaacctctgcccctacaactagcacaacccctgcttctatacccagcacaacctctgccccaacaaccagcacaacctctgctcccacaacgagcacaacttctgcccctacaaccagcacaacctccactccacagaccaccacatcctctgcccctacaagcagcacaacctcggctcctaccaccagcacaatctctgcccctacaaccagcacaatctctgcccctacaaccagcacaacctctgctcccacagccagcacaacgtcagctcctacgagcacttcctcggctcctacaaccaacacaacctctgcccctacaactagcactacctctgctcccataaccagcacaatctctgcccctacaaccagcacaacctccactccacagaccagcacaatctcttcccctacaaccagcacaacctccactccgcagaccagcacaacctcttcccctacaactagcacaacctcagctcctacaaccagcacaacttctgcccctacaaccagcacaacctccactccacagaccagcatatcctctgcccctacaagcagcacaacctctgctcctacagccagcacaatctctgcccctacaaccagcacaacctctttccatacaaccagcacaacctctccccctacaagcagcacaagctccactccacagaccagcaaaacctcagctgctacaagcagcacaacctccggttctggaactactcccagccccgttcccaccaccagcacagcctctgtttcaaagaccagcacaagccatgtttctgtatccaagacaacccactcccaaccagtcaccagagactgtcatccccggtgcacctggaccaagtggtttgacgtggactttccatcccctggaccccacggtggggacaaggaaacctacaacaacatcatcaggagtggggaaaaaatctgccgccgacctgaggagatcaccaggctccagtgccgagccgagagccacccggaggtgagcatcgaacacctgggccaggtggtgcagtgcagccgggaagagggcctggtgtgccggaaccaggaccagcagggacccttcaagatgtgcctcaactacgaggtgcgtgtgctctgctgcgagacccccaaaggctgccccgtgacctccacacctgtgacagctcctagcacccctagtgggagagccaccagcccaactcagagcacttcctcttggcagaaatccaggacaaccactttggtgacaaccagcacaacctccactccacagaccagcacaacctctgcccctacaaccagcacaatccctgcttctacacccagcacaacctctgcccctacaaccagcacaacctctgcccctacaaccagcacgacctcagctcctacacacagaacgacttctggtcctacaaccagcacaaccttggctcctacaaccagcacaacctctgctccaacaaccagcacaaactctgctcctacaaccagcacaatctctgcctctacaaccagcacaatctctgcccctacaaccagcacaatctcttcccctacaagcagcacaacctccactccacagaccagcaaaacctcagctgctacaagcagcacaacctccggttctggaactactccaagccctgttcccaccaccagcacaacctctgcctctacaaccagcacaacttctgctcctacaaccagcacaacctctggtcctggaactactccaagccctgttcccagcaccagtacaacctctgctgctacaaccagcacaacctctgctcctacaaccagaacaacatctgctcctacaagcagcatgacctctggtcctggaactactcccagccctgttcccaccaccagcacaacctctgctcctacaactagcacaacctctggtcctggaactactcccagccctgttcccaccaccagcacaacctctgctcctataaccagcacaacctctggtcctggaagtactcccagccctgttcccaccaccagcacaacctctgctcctacaaccagcacaacctctgcctctacagccagcacaacctctggtcctggaactactcccagccctgttcccaccaccagcacaacctctgctcctacaaccagaacaacctctgcctctacagccagcacaacctctggtcctggaagtactcccagccctgttcccaccaccagcacaacctctgctcctacaaccagaacaacccctgcctctacagccagcacaacctctggtcctggaactactcccagccctgttcccaccacaagcacaacctctgcttctacaaccagcacaatctctctccctacaaccagcacaacctctgctcctataaccagcatgacctctggtcctggaactactcccagccctgttcccaccaccagcacaacctctgctcctacaaccagcacaacctctgcctctacagccagcacaacctctggtcctggaactactcccagccctgttcccaccaccagcacaacctctgctcctacaaccagcacaacctctgcctctacagccagcacaacctctggtcctggaacttctctcagccctgttcccaccacgagcacaacctctgctcctacaactagcacaacctctggtcctggaactactcccagccctgttcccaccaccagcacaacctctgctcctacaaccagcacgacctctggtcctggaactactcccagccccgttcccaccaccagcacaacccctgtttcaaagaccagcacaagccatctttctgtatccaagacaacccactcccaaccagtcaccagtgactgtcatcctctgtgcgcctggacaaagtggttcgacgtggacttcccatcccctggaccccacggcggggacaaggaaacctacaacaacatcatcaggagtggggaaaaaatctgccgccgacctgaggagatcaccaggctccagtgccgagccgagagccacccggaggtgaacattgaacacctgggtcaggtggtgcagtgcagccgtgaagagggcctggtgtgccggaaccaggaccagcagggacccttcaagatgtgcctcaactacgaggtgcgcgtgctctgctgcgagacccccagaggctgcccggtgacctctgtgaccccatatgggacttctcctaccaatgctctgtatccttccctgtctacttccatggtatccgcctccgtggcatccacctctgtggcatccagctctgtggcatccagctctgtggcttactccacccaaacctgcttctgcaacgtggctgaccggctctaccctgcaggttcgtgagtgtttctggtgcaattgtttc

SEQ ID NO: 273 - RNA, 10893 nt, Homo sapiens
  source 1..10893: mol_type = mRNA
gcccggccctcccggtctccaccgtgtgtgtccgcgaggtctgccgctggtccagctggtacaatgggcaccgcccagagcccggcctgggaggcggagactttgagacgtttgaaaacctgaggcagagagggtaccaggtatgccctgtgctggctgacatcgagtgccgggcggcgcagcttcccgacatgccgctggaggagctgggccagcaggtggactgtgaccgcatgcgggggctgatgtgcgccaacagccaacagagtcccccgctctgtcacgactacgagctgcgggttctctgctgcgaatacgtgccctgtggcccctccccggccccaggcaccagccctcagccctccctcagtgccagcacggagcctgctgtgcctaccccaacccagaccacagcaaccgaaaagaccaccctatgggtgaccccgagcatccggtcgacggcggccctcacctcgcagactgggtccagctcaggccccgtgacggtcaccccctcggccccaggtaccaccacctgccagccccggtgtcagtggacagagtggtttgatgaggactaccccaagtctgaacaacttggaggggacgttgagtcctacgataagatcagggccgctggagggcacttatgccagcagcctaaggacatagagtgccaggccgagagcttccccaactggaccctggcacaggtggggcagaaggtgcactgtgacgtccacttcggcctggtgtgcaggaactgggagcaggagggcgtcttcaagatgtgctacaactacaggatccgggtcctctgctgcagtgacgaccactgcaggggacgtgccacaaccccgccaccgaccacagagctggagacggccaccaccaccaccacccaggccctgttctcaacgccgcagcctacgagtagcccggggctgaccagggctcccccggccagcaccacagcagtccccaccctctcagaaggactgacatcccccagatacacaagcacccttggtacagccaccacgggaggccccacgacgcctgcaggctccacagaacccactgtcccaggggtggccacatccacccttccaacacgctcagcccttccagggacgacggggagcttgggcacatggcgcccctcacagccacccacgctggccccaacaacaatggcaacctccagagctcgcccgacaggcacagccagcaccgcttccaaagagccgctgaccacgagcctggcgccaacactcacgagcgagctgtccacctctcaggccgagaccagcacgcccaggacagagacgacaatgagccccttgactaacaccaccaccagccagggcacgacccgctgtcaaccgaagtgtgagtggacagagtggtttgacgtggacttcccaacctcaggggttgcaggcggggacatggaaacttttgaaaacatcagggctgctgggggcaagatgtgctgggcaccaaagagcatagagtgccgggcggagaactaccccgaggtaagcatcgaccaggtcgggcaggtgctgacctgcagcctggagacggggctgacctgcaagaacgaagaccagacaggcaggttcaacatgtgcttcaactacaacgtgcgtgtgctttgctgtgacgactacagccactgccccagtaccccagccaccagctccacggccacgccctcctcaactccggggacgacctggatcctcacaaagccgaccacaacagccactacgactgcgtccactggatccacggccaccccgacctccaccctgagaacagctccccctcccaaagtgctgaccaccacggccaccacacccacagtcaccagctccaaagccactccctcctccagtccagggactgcaaccgcccttccagcactgagaagcacagccaccacacccacagctaccagcgttacacccatcccctcttcctccctgggcaccacctggacccgcctatcacagaccaccacacccacggccaccatgtccacagccacaccctcctccactccagagactgcccacacctccacagtgcttaccgccacggccaccacaactggggccaccggctctgtggccaccccctcctccaccccaggaacagctcacactaccaaagtgccaactaccacaaccacgggcttcacagccaccccctcctccagcccagggacggcactcacgcctccagtgtggatcagcacaaccaccacacccacaaccagaggctccacggtgaccccctcctccatcccggggaccacccacaccgccacagtgctgaccaccaccaccacaactgtggccactggttctatggcaacaccctcctctagcacacagaccagtggtactcccccatcactgaccaccacggccactacgatcacggccaccggctccaccaccaacccctcctcaactcctgggacaactcccatccccccagtgctgaccaccaccgccaccacacctgcagccaccagcaacacagtgactccctcctctgccctagggaccacccacacacccccagtgccgaacaccatggccaccacacacgggcgatccctgccccccagcagtccccacacggtgcgcacagcctggacttcggccacctcgggcatcttgggcaccacccacatcacagagccttccacggtgacttcccacaccctagcagcaaccaccggtaccacccagcactcgactccagccctttccagccctcaccctagcagcagaaccaccgagtcacccccttctccagggacgaccaccccgggccacaccacggccacctccaggaccacagccacggccacacccagcaagacccgcacctcgaccctgctgcccagcagccccacatcggcccccataaccacggtggtgaccatgggctgtgagccccagtgtgcctggtcagagtggctggactacagctaccccatgccggggccctctggcggggactttgacacctactccaacatccgtgcggccggaggggccgtctgtgagcagcccctgggcctcgagtgccgtgcccaggcccagcctggtgtccccctgcgggagttgggccaggtcgtggaatgcagcctggactttggcctggtctgcaggaaccgtgagcaggtggggaagttcaagatgtgcttcaactatgaaatccgtgtgttctgctgcaactacggccactgccccagcaccccggccaccagctctacggccatgccctcctccactccggggacgacctggatcctcacagagctgaccacaacagccactacgactgagtccactggatccacggccaccccgtcctccaccccagggaccacctggatcctcacagagccgagcactacagccaccgtgacggtgcccaccggatccacggccaccgcctcctccacccaggcaactgctggcaccccacatgtgagcaccacggccacgacacccacagtcaccagctccaaagccactcccttctccagtccagggactgcaaccgcccttccagcactgagaagcacagccaccacacccacagctaccagctttacagccatcccctcctcctccctgggcaccacctggacccgcctatcacagaccaccacacccacggccaccatgtccacagccacaccctcctccactccagagactgtccacacctccacagtgcttaccaccacggccaccacaaccggggccaccggctctgtggccaccccctcctccaccccaggaacagctcacactaccaaagtgctgactaccacaaccacgggcttcacagccaccccctcctccagcccagggacggcacgcacgcttccagtgtggatcagcacaaccaccacacccacaaccagaggttccacggtgaccccctcctccatcccggggaccacccacacccccacagtgctgaccaccaccaccacaactgtggccactggttctatggcaacaccctcctctagcacacagaccagtggtactcccccatcactgaccaccacggccactacgatcacggccaccggctccaccaccaacccctcctcaactccagggacaacacctatccccccagtgctgaccaccaccgccaccacacctgcagccaccagcagcacagtgactccctcctctgccctagggaccacccacacacccccagtgccgaacaccacggccaccacacacgggcgatccctgtcccccagcagtccccacacggtgcgcacagcctggacttcggccacctcaggcaccttgggcaccacccacatcacagagccttccacggggacttcccacaccccagcagcaaccaccggtaccacccagcactcgactccagccctgtccagccctcaccctagcagcaggaccaccgagtcacccccttctccagggacgaccaccccgggccacaccagggccacctccaggaccacggccacggccacacccagcaagacccgcacctcgaccctgctgcccagcagccccacatcggccccaataaccacggtggtgaccatgggctgtgagccccagtgtgcctggtcagagtggctggactacagctaccccatgccggggccctctggcggggactttgacacctactccaacatccgtgcggccggaggggccgtctgtgagcagcccctgggcctcgagtgccgtgcccaggcccagcctggtgtccccctgcgggagttgggccaggtcgtggaatgcagcctggactttggcctggtctgcaggaaccgtgagcaggtggggaagttcaagatgtgcttcaactatgaaatccgtgtgttctgctgcaactacggccactgccccagcaccccggccaccagctctacggccacgccctcctccactccagggacgacctggatcctcacagagcagaccacagcagccactacgaccgcaaccactggatccacggccatcccgtcctccaccccgggaacagctccccctcccaaagtgctgaccagcacggccaccacacccacagccaccagttccaaagccacttcctcctccagtccaaggactgcaaccacccttccagtgctgacaagcacagccaccaaatccacagctaccagctttacacccatcccctccttcacccttgggaccaccgggaccctcccagaacagaccaccacacccatggccaccatgtccacaatccacccctcctccactccggagaccacccacacctccacagtgctgaccacgaaggccaccacgacaagggccaccagttccatgtccaccccctcctccactccggggacgacctggatcctcacagagctgaccacagcagccactacaactgcagccactggccccacggccaccccgtcctccaccccagggaccacctggatcctcacagagcccagcactacagccaccgtgacggtgcccaccggatccacggccaccgcctcctccacccgggcaactgctggcaccctcaaagtgctgaccagcacggccaccacacccacagtcatcagctccagagccactccctcctccagtccagggactgcaaccgcccttccagcactgagaagcacagccaccacacccacagctaccagcgttacagccatcccctcttcctccctgggcaccgcctggacccgcctatcacagaccaccacacccacggccaccatgtccacagccacaccctcctctactccagagactgtccacacctccacagtgcttaccaccacgaccaccacaaccagggccaccggctctgtggccaccccctcctccaccccaggaacagctcacactaccaaagtgccgactaccacaaccacgggcttcacagccaccccctcctccagcccagggacggcactcacgcctccagtgtggatcagcacaaccaccacacccacaaccagaggctccacggtgaccccctcctccatcccggggaccacccacaccgccacagtgctgaccaccaccaccacaactgtggccactggttctatggcaacaccctcctctagcacacagaccagtggtactcccccatcactgaccaccacggccactacgatcacagccaccggctccaccaccaacccctcctcaactccagggacaactcccatccccccagtgctgaccaccaccgccaccacacctgcagccaccagcagcacagtgactccctcctctgccctagggaccacccacacacccccagtgccgaacaccacggccaccacacacgggcggtccctgccccccagcagtccccacacggtgcgcacagcctggacttcggccacctcgggcatcttgggcaccacccacatcacagagccttccacggtgacttcccacaccccagcagcaaccaccagtaccacccagcactcgactccagccctgtccagccctcaccctagcagcaggaccaccgagtcacccccttctccagggacgaccaccccgggccacaccaggggcacctccaggaccacagccacagccacacccagcaagacccgcacctcgaccctgctgcccagcagccccacatcggcccccataaccacggtggtgaccacgggctgtgagccccagtgtgcctggtcagagtggctggactacagctaccccatgccggggccctctggcggggactttgacacctactccaacatccgtgcggccggaggggcagtctgtgagcagcccctgggcctcgagtgccgtgcccaggcccagcctggtgtccccctgcgggagttgggccaggtcgtggaatgcagcctggactttggcctggtctgcaggaaccgtgagcaggtggggaagttcaagatgtgcttcaactatgaaatccgtgtgttctgctgcaactacggccactgccccagcaccccggccaccagctctacggccacgccctcctcaactccggggacgacctggatcctcacaaagctgaccacaacagccactacgactgagtccactggatccacggccaccccgtcctccaccccagggaccacctggatcctcacagagccgagcactacagccaccgtgacggtgcccaccggatccacggccaccgcctcctccacccaggcaactgctggcaccccacatgtgagcaccacggccacgacacccacagtcaccagctccaaagccactcccttctccagtccagggactgcaaccgcccttccagcactgagaagcacagccaccacacccacagctaccagctttacagccatcccctcctcctccctgggcaccacctggacccgcctatcacagaccaccacacccacggccaccatgtccacagccacaccctcctccactccagagactgcccacacctccacagtgcttaccaccacggccaccacaaccagggccaccggctctgtggccaccccctcttccaccccaggaacagctcacactaccaaagtgccgactaccacaaccacgggcttcacagtcaccccctcctccagcccagggacggcacgcacgcctccagtgtggatcagcacaaccaccacacccacaaccagtggctccacggtgaccccctcctccgtcccggggaccacccacacccccacagtgctgaccaccaccaccacaactgtggccactggttctatggcaacaccctcctctagcacacagaccagtggtactcccccatcactgatcaccacggccactacgatcacggccaccggctccaccaccaacccctcctcaactccagggacaacacctatccccccagtgctgaccaccaccgccaccacacctgcagccaccagcagcacagtgactccctcctctgccctagggaccacccacacacccccagtgccgaacaccacggccaccacacacgggcgatccctgtcccccagcagtccccacacggtgcgcacagcctggacttcggccacctcaggcaccttgggcaccacccacatcacagagccttccacggggacttcccacaccccagcagcaaccaccggtaccacccagcactcgactccagccctgtccagccctcaccctagcagcaggaccaccgagtcacccccttccccagggacgaccaccccgggccacaccacggccacctccaggaccacggccacggccacacccagcaagacccgcacctcgaccctgctgcccagcagccccacatcggcccccataaccacggtggtgaccacgggctgtgagccccagtgtgcctggtcagagtggctggactacagctaccccatgccggggccctctggcggggactttgacacctactccaacatccgtgcggccggaggggccgtctgtgagcagcccctgggcctcgagtgccgtgcccaggcccagcctggtgtccccctgggggagttgggccaggtcgtggaatgcagcctggactttggcctggtctgcaggaaccgtgagcaggtggggaagttcaagatgtgcttcaactatgaaatccgtgtgttctgctgcaactacggccactgccccagcaccccggccaccagctctacggccatgccctcctccactccggggacgacctggatcctcacagagctgaccacaacagccactacgactgcatccactggatccacggccaccccgtcctccaccccgggaacagctccccctcccaaagtgctgaccagcccggccaccacacccacagccaccagttccaaagccacttcctcctccagtccaaggactgcaaccacccttccagtgctgacaagcacagccaccaaatccacagctaccagcgttacacccatcccctcctccacccttgggaccaccgggaccctcccagaacagaccaccacacccgtggccaccatgtccacaatccacccctcctccactccggagaccacccacacctccacagtgctgaccacgaaggccaccacgacaagggccaccagttccacgtccaccccctcctccactccggggacgacctggatcctcacagagctgaccacagcagccactacaactgcagccactggccccacggccaccccgtcctccaccccagggaccacctggatcctcacagagctgaccacaacagccactacgactgcgtccactggatccacggccaccccgtcctccaccccagggaccacctggatcctcacagagccgagcactacagccaccgtgacggtgcccaccggatccacggccaccgcctcctccacccaggcaactgctggcaccccacatgtgagcaccacggccacgacacccacagtcaccagctccaaagccactccctcctccagtccagggactgcaactgcccttccagcactgagaagcacagccaccacacccacagctaccagctttacagccatcccctcctcctccctgggcaccacctggacccgcctatcacagaccaccacacccacggccaccatgtccacagccacaccctcctccactccagagactgtccacacctccacagtgcttaccgccacggccaccacaaccggggccaccggctctgtggccaccccctcctccaccccaggaacagctcacactaccaaagtgccgactaccacaaccacgggcttcacagccaccccctcctccagcccagggacggcactcacgcctccagtgtggatcagcacaaccaccacacccacaaccaccacacccacaaccagtggctccacggtgaccccctcctccatcccggggaccacccacaccgccagagtgctgaccaccaccaccacaactgtggccactggttctatggcaacaccctcctctagcacacagaccagtggtactcccccatcactgaccaccacggccactacgatcacggccaccggctccaccaccaacccctcctcaactccagggacaacacccatcaccccagtgctgaccagcacggccaccacacccgcagccaccagctccaaagccacttcctcctccagtccaaggactgcaaccacccttccagtgctgacaagcacagccacaaaatccacagctaccagctttacacccatcccctcctccaccctgtggaccacgtggaccgtcccagcacagaccaccacacccatgtccaccatgtccacaatccacacctcctctactccagagaccacccacacctccacagtgctgaccaccacagccaccatgacaagggccaccaattccacggccacaccctcctccactctggggacgacccggatcctcactgagctgaccacaacagccactacaactgcagccactggatccacggccaccctgtcctccaccccagggaccacctggatcctcacagagccgagcactatagccaccgtgatggtgcccaccggttccacggccaccgcctcctccactctgggaacagctcacacccccaaagtggtgaccaccatggccactatgcccacagccactgcctccacggttcccagctcgtccaccgtggggaccacccgcacccctgcagtgctccccagcagcctgccaaccttcagcgtgtccactgtgtcctcctcagtcctcaccaccctgagacccactggcttccccagctcccacttctctactccctgcttctgcagggcatttggacagtttttctcgcccg

SEQ ID NO: 274 - RNA, 10953 nt, Homo sapiens
  source 1..10953: mol_type = mRNA
gccaggacccctttcccatgccccttgcaggcccggccctcccggtctccaccgtgtgtgtccgcgaggtctgccgctggtccagctggtacaatgggcaccgcccagagcccggcctgggaggcggagactttgagacgtttgaaaacctgaggcagagagggtaccaggtatgccctgtgctggctgacatcgagtgccgggcggcgcagcttcccgacatgccgctggaggagctgggccagcaggtggactgtgaccgcatgcgggggctgatgtgcgccaacagccaacagagtcccccgctctgtcacgactacgagctgcgggttctctgctgcgaatacgtgccctgtggcccctccccggccccaggcaccagccctcagccctccctcagtgccagcacggagcctgctgtgcctaccccaacccagaccacagcaaccgaaaagaccaccctatgggtgaccccgagcatccggtcgacggcggccctcacctcgcagactgggtccagctcaggccccgtgacggtcaccccctcggccccaggtaccaccacctgccagccccggtgtcagtggacagagtggtttgatgaggactaccccaagtctgaacaacttggaggggacgttgagtcctacgataagatcagggccgctggagggcacttatgccagcagcctaaggacatagagtgccaggccgagagcttccccaactggaccctggcacaggtggggcagaaggtgcactgtgacgtccacttcggcctggtgtgcaggaactgggagcaggagggcgtcttcaagatgtgctacaactacaggatccgggtcctctgctgcagtgacgaccactgcaggggacgtgccacaaccccgccaccgaccacagagctggagacggccaccaccaccaccacccaggccctgttctcaacgccgcagcctacgagtagcccggggctgaccagggctcccccggccagcaccacagcagtccccaccctctcagaaggactgacatcccccagatacacaagcacccttggtacagccaccacgggaggccccacgacgcctgcaggctccacagaacccactgtcccaggggtggccacatccacccttccaacacgctcagcccttccagggacgacggggagcttgggcacatggcgcccctcacagccacccacgctggccccaacaacaatggcaacctccagagctcgcccgacaggcacagccagcaccgcttccaaagagccgctgaccacgagcctggcgccaacactcacgagcgagctgtccacctctcaggccgagaccagcacgcccaggacagagacgacaatgagccccttgactaacaccaccaccagccagggcacgacccgctgtcaaccgaagtgtgagtggacagagtggtttgacgtggacttcccaacctcaggggttgcaggcggggacatggaaacttttgaaaacatcagggctgctgggggcaagatgtgctgggcaccaaagagcatagagtgccgggcggagaactaccccgaggtaagcatcgaccaggtcgggcaggtgctgacctgcagcctggagacggggctgacctgcaagaacgaagaccagacaggcaggttcaacatgtgcttcaactacaacgtgcgtgtgctttgctgtgacgactacagccactgccccagtaccccagccaccagctccacggccacgccctcctcaactccggggacgacctggatcctcacaaagccgaccacaacagccactacgactgcgtccactggatccacggccaccccgacctccaccctgagaacagctccccctcccaaagtgctgaccaccacggccaccacacccacagtcaccagctccaaagccactccctcctccagtccagggactgcaaccgcccttccagcactgagaagcacagccaccacacccacagctaccagcgttacacccatcccctcttcctccctgggcaccacctggacccgcctatcacagaccaccacacccacggccaccatgtccacagccacaccctcctccactccagagactgcccacacctccacagtgcttaccgccacggccaccacaactggggccaccggctctgtggccaccccctcctccaccccaggaacagctcacactaccaaagtgccaactaccacaaccacgggcttcacagccaccccctcctccagcccagggacggcactcacgcctccagtgtggatcagcacaaccaccacacccacaaccagaggctccacggtgaccccctcctccatcccggggaccacccacaccgccacagtgctgaccaccaccaccacaactgtggccactggttctatggcaacaccctcctctagcacacagaccagtggtactcccccatcactgaccaccacggccactacgatcacggccaccggctccaccaccaacccctcctcaactcctgggacaactcccatccccccagtgctgaccaccaccgccaccacacctgcagccaccagcaacacagtgactccctcctctgccctagggaccacccacacacccccagtgccgaacaccatggccaccacacacgggcgatccctgccccccagcagtccccacacggtgcgcacagcctggacttcggccacctcgggcatcttgggcaccacccacatcacagagccttccacggtgacttcccacaccctagcagcaaccaccggtaccacccagcactcgactccagccctttccagccctcaccctagcagcagaaccaccgagtcacccccttctccagggacgaccaccccgggccacaccacggccacctccaggaccacagccacggccacacccagcaagacccgcacctcgaccctgctgcccagcagccccacatcggcccccataaccacggtggtgaccatgggctgtgagccccagtgtgcctggtcagagtggctggactacagctaccccatgccggggccctctggcggggactttgacacctactccaacatccgtgcggccggaggggccgtctgtgagcagcccctgggcctcgagtgccgtgcccaggcccagcctggtgtccccctgcgggagttgggccaggtcgtggaatgcagcctggactttggcctggtctgcaggaaccgtgagcaggtggggaagttcaagatgtgcttcaactatgaaatccgtgtgttctgctgcaactacggccactgccccagcaccccggccaccagctctacggccatgccctcctccactccggggacgacctggatcctcacagagctgaccacaacagccactacgactgagtccactggatccacggccaccccgtcctccaccccagggaccacctggatcctcacagagccgagcactacagccaccgtgacggtgcccaccggatccacggccaccgcctcctccacccaggcaactgctggcaccccacatgtgagcaccacggccacgacacccacagtcaccagctccaaagccactcccttctccagtccagggactgcaaccgcccttccagcactgagaagcacagccaccacacccacagctaccagctttacagccatcccctcctcctccctgggcaccacctggacccgcctatcacagaccaccacacccacggccaccatgtccacagccacaccctcctccactccagagactgtccacacctccacagtgcttaccaccacggccaccacaaccggggccaccggctctgtggccaccccctcctccaccccaggaacagctcacactaccaaagtgctgactaccacaaccacgggcttcacagccaccccctcctccagcccagggacggcacgcacgcttccagtgtggatcagcacaaccaccacacccacaaccagaggttccacggtgaccccctcctccatcccggggaccacccacacccccacagtgctgaccaccaccaccacaactgtggccactggttctatggcaacaccctcctctagcacacagaccagtggtactcccccatcactgaccaccacggccactacgatcacggccaccggctccaccaccaacccctcctcaactccagggacaacacctatccccccagtgctgaccaccaccgccaccacacctgcagccaccagcagcacagtgactccctcctctgccctagggaccacccacacacccccagtgccgaacaccacggccaccacacacgggcgatccctgtcccccagcagtccccacacggtgcgcacagcctggacttcggccacctcaggcaccttgggcaccacccacatcacagagccttccacggggacttcccacaccccagcagcaaccaccggtaccacccagcactcgactccagccctgtccagccctcaccctagcagcaggaccaccgagtcacccccttctccagggacgaccaccccgggccacaccagggccacctccaggaccacggccacggccacacccagcaagacccgcacctcgaccctgctgcccagcagccccacatcggccccaataaccacggtggtgaccatgggctgtgagccccagtgtgcctggtcagagtggctggactacagctaccccatgccggggccctctggcggggactttgacacctactccaacatccgtgcggccggaggggccgtctgtgagcagcccctgggcctcgagtgccgtgcccaggcccagcctggtgtccccctgcgggagttgggccaggtcgtggaatgcagcctggactttggcctggtctgcaggaaccgtgagcaggtggggaagttcaagatgtgcttcaactatgaaatccgtgtgttctgctgcaactacggccactgccccagcaccccggccaccagctctacggccacgccctcctccactccagggacgacctggatcctcacagagcagaccacagcagccactacgaccgcaaccactggatccacggccatcccgtcctccaccccgggaacagctccccctcccaaagtgctgaccagcacggccaccacacccacagccaccagttccaaagccacttcctcctccagtccaaggactgcaaccacccttccagtgctgacaagcacagccaccaaatccacagctaccagctttacacccatcccctccttcacccttgggaccaccgggaccctcccagaacagaccaccacacccatggccaccatgtccacaatccacccctcctccactccggagaccacccacacctccacagtgctgaccacgaaggccaccacgacaagggccaccagttccatgtccaccccctcctccactccggggacgacctggatcctcacagagctgaccacagcagccactacaactgcagccactggccccacggccaccccgtcctccaccccagggaccacctggatcctcacagagcccagcactacagccaccgtgacggtgcccaccggatccacggccaccgcctcctccacccgggcaactgctggcaccctcaaagtgctgaccagcacggccaccacacccacagtcatcagctccagagccactccctcctccagtccagggactgcaaccgcccttccagcactgagaagcacagccaccacacccacagctaccagcgttacagccatcccctcttcctccctgggcaccgcctggacccgcctatcacagaccaccacacccacggccaccatgtccacagccacaccctcctctactccagagactgtccacacctccacagtgcttaccaccacgaccaccacaaccagggccaccggctctgtggccaccccctcctccaccccaggaacagctcacactaccaaagtgccgactaccacaaccacgggcttcacagccaccccctcctccagcccagggacggcactcacgcctccagtgtggatcagcacaaccaccacacccacaaccagaggctccacggtgaccccctcctccatcccggggaccacccacaccgccacagtgctgaccaccaccaccacaactgtggccactggttctatggcaacaccctcctctagcacacagaccagtggtactcccccatcactgaccaccacggccactacgatcacagccaccggctccaccaccaacccctcctcaactccagggacaactcccatccccccagtgctgaccaccaccgccaccacacctgcagccaccagcagcacagtgactccctcctctgccctagggaccacccacacacccccagtgccgaacaccacggccaccacacacgggcggtccctgccccccagcagtccccacacggtgcgcacagcctggacttcggccacctcgggcatcttgggcaccacccacatcacagagccttccacggtgacttcccacaccccagcagcaaccaccagtaccacccagcactcgactccagccctgtccagccctcaccctagcagcaggaccaccgagtcacccccttctccagggacgaccaccccgggccacaccaggggcacctccaggaccacagccacagccacacccagcaagacccgcacctcgaccctgctgcccagcagccccacatcggcccccataaccacggtggtgaccacgggctgtgagccccagtgtgcctggtcagagtggctggactacagctaccccatgccggggccctctggcggggactttgacacctactccaacatccgtgcggccggaggggcagtctgtgagcagcccctgggcctcgagtgccgtgcccaggcccagcctggtgtccccctgcgggagttgggccaggtcgtggaatgcagcctggactttggcctggtctgcaggaaccgtgagcaggtggggaagttcaagatgtgcttcaactatgaaatccgtgtgttctgctgcaactacggccactgccccagcaccccggccaccagctctacggccacgccctcctcaactccggggacgacctggatcctcacaaagctgaccacaacagccactacgactgagtccactggatccacggccaccccgtcctccaccccagggaccacctggatcctcacagagccgagcactacagccaccgtgacggtgcccaccggatccacggccaccgcctcctccacccaggcaactgctggcaccccacatgtgagcaccacggccacgacacccacagtcaccagctccaaagccactcccttctccagtccagggactgcaaccgcccttccagcactgagaagcacagccaccacacccacagctaccagctttacagccatcccctcctcctccctgggcaccacctggacccgcctatcacagaccaccacacccacggccaccatgtccacagccacaccctcctccactccagagactgcccacacctccacagtgcttaccaccacggccaccacaaccagggccaccggctctgtggccaccccctcttccaccccaggaacagctcacactaccaaagtgccgactaccacaaccacgggcttcacagtcaccccctcctccagcccagggacggcacgcacgcctccagtgtggatcagcacaaccaccacacccacaaccagtggctccacggtgaccccctcctccgtcccggggaccacccacacccccacagtgctgaccaccaccaccacaactgtggccactggttctatggcaacaccctcctctagcacacagaccagtggtactcccccatcactgatcaccacggccactacgatcacggccaccggctccaccaccaacccctcctcaactccagggacaacacctatccccccagtgctgaccaccaccgccaccacacctgcagccaccagcagcacagtgactccctcctctgccctagggaccacccacacacccccagtgccgaacaccacggccaccacacacgggcgatccctgtcccccagcagtccccacacggtgcgcacagcctggacttcggccacctcaggcaccttgggcaccacccacatcacagagccttccacggggacttcccacaccccagcagcaaccaccggtaccacccagcactcgactccagccctgtccagccctcaccctagcagcaggaccaccgagtcacccccttccccagggacgaccaccccgggccacaccacggccacctccaggaccacggccacggccacacccagcaagacccgcacctcgaccctgctgcccagcagccccacatcggcccccataaccacggtggtgaccacgggctgtgagccccagtgtgcctggtcagagtggctggactacagctaccccatgccggggccctctggcggggactttgacacctactccaacatccgtgcggccggaggggccgtctgtgagcagcccctgggcctcgagtgccgtgcccaggcccagcctggtgtccccctgggggagttgggccaggtcgtggaatgcagcctggactttggcctggtctgcaggaaccgtgagcaggtggggaagttcaagatgtgcttcaactatgaaatccgtgtgttctgctgcaactacggccactgccccagcaccccggccaccagctctacggccatgccctcctccactccggggacgacctggatcctcacagagctgaccacaacagccactacgactgcatccactggatccacggccaccccgtcctccaccccgggaacagctccccctcccaaagtgctgaccagcccggccaccacacccacagccaccagttccaaagccacttcctcctccagtccaaggactgcaaccacccttccagtgctgacaagcacagccaccaaatccacagctaccagcgttacacccatcccctcctccacccttgggaccaccgggaccctcccagaacagaccaccacacccgtggccaccatgtccacaatccacccctcctccactccggagaccacccacacctccacagtgctgaccacgaaggccaccacgacaagggccaccagttccacgtccaccccctcctccactccggggacgacctggatcctcacagagctgaccacagcagccactacaactgcagccactggccccacggccaccccgtcctccaccccagggaccacctggatcctcacagagctgaccacaacagccactacgactgcgtccactggatccacggccaccccgtcctccaccccagggaccacctggatcctcacagagccgagcactacagccaccgtgacggtgcccaccggatccacggccaccgcctcctccacccaggcaactgctggcaccccacatgtgagcaccacggccacgacacccacagtcaccagctccaaagccactccctcctccagtccagggactgcaactgcccttccagcactgagaagcacagccaccacacccacagctaccagctttacagccatcccctcctcctccctgggcaccacctggacccgcctatcacagaccaccacacccacggccaccatgtccacagccacaccctcctccactccagagactgtccacacctccacagtgcttaccgccacggccaccacaaccggggccaccggctctgtggccaccccctcctccaccccaggaacagctcacactaccaaagtgccgactaccacaaccacgggcttcacagccaccccctcctccagcccagggacggcactcacgcctccagtgtggatcagcacaaccaccacacccacaaccaccacacccacaaccagtggctccacggtgaccccctcctccatcccggggaccacccacaccgccagagtgctgaccaccaccaccacaactgtggccactggttctatggcaacaccctcctctagcacacagaccagtggtactcccccatcactgaccaccacggccactacgatcacggccaccggctccaccaccaacccctcctcaactccagggacaacacccatcaccccagtgctgaccagcacggccaccacacccgcagccaccagctccaaagccacttcctcctccagtccaaggactgcaaccacccttccagtgctgacaagcacagccacaaaatccacagctaccagctttacacccatcccctcctccaccctgtggaccacgtggaccgtcccagcacagaccaccacacccatgtccaccatgtccacaatccacacctcctctactccagagaccacccacacctccacagtgctgaccaccacagccaccatgacaagggccaccaattccacggccacaccctcctccactctggggacgacccggatcctcactgagctgaccacaacagccactacaactgcagccactggatccacggccaccctgtcctccaccccagggaccacctggatcctcacagagccgagcactatagccaccgtgatggtgcccaccggttccacggccaccgcctcctccactctgggaacagctcacacccccaaagtggtgaccaccatggccactatgcccacagccactgcctccacggttcccagctcgtccaccgtggggaccacccgcacccctgcagtgctccccagcagcctgccaaccttcagcgtgtccactgtgtcctcctcagtcctcaccaccctgagacccactggcttccccagctcccacttctctactccctgcttctgcagggcatttggacagtttttctcgcccggtgagtgcatgtggataacactgctgtacc

SEQ ID NO: 275 - RNA, 14 nt, synthetic construct
  variation 1..14: note = Description of Sequence: ASO sequence
  misc_feature 1..14: note = Note: the sequence may be DNA or RNA
  source 1..14: mol_type = other RNA
cgccgggttggagg

SEQ ID NO: 276 - RNA, 14 nt, synthetic construct
  variation 1..14: note = Description of Sequence: ASO sequence
  misc_feature 1..14: note = Note: the sequence may be DNA or RNA
  source 1..14: mol_type = other RNA
gcgccgggttggag

SEQ ID NO: 277 - RNA, 14 nt, synthetic construct
  variation 1..14: note = Description of Sequence: ASO sequence
  misc_feature 1..14: note = Note: the sequence may be DNA or RNA
  source 1..14: mol_type = other RNA
tgcgccgggttgga

SEQ ID NO: 278 - RNA, 14 nt, synthetic construct
  variation 1..14: note = Description of Sequence: ASO sequence
  misc_feature 1..14: note = Note: the sequence may be DNA or RNA
  source 1..14: mol_type = other RNA
gtgcgccgggttgg

SEQ ID NO: 279 - RNA, 14 nt, synthetic construct
  variation 1..14: note = Description of Sequence: ASO sequence
  misc_feature 1..14: note = Note: the sequence may be DNA or RNA
  source 1..14: mol_type = other RNA
tgtgcgccgggttg

SEQ ID NO: 280 - RNA, 14 nt, synthetic construct
  variation 1..14: note = Description of Sequence: ASO sequence
  misc_feature 1..14: note = Note: the sequence may be DNA or RNA
  source 1..14: mol_type = other RNA
ttgtgcgccgggtt

SEQ ID NO: 281 - RNA, 14 nt, synthetic construct
  variation 1..14: note = Description of Sequence: ASO sequence
  misc_feature 1..14: note = Note: the sequence may be DNA or RNA
  source 1..14: mol_type = other RNA
gttgtgcgccgggt

SEQ ID NO: 282 - RNA, 14 nt, synthetic construct
  variation 1..14: note = Description of Sequence: ASO sequence
  misc_feature 1..14: note = Note: the sequence may be DNA or RNA
  source 1..14: mol_type = other RNA
cgttgtgcgccggg

SEQ ID NO: 283 - RNA, 14 nt, synthetic construct
  variation 1..14: note = Description of Sequence: ASO sequence
  misc_feature 1..14: note = Note: the sequence may be DNA or RNA
  source 1..14: mol_type = other RNA
ccgttgtgcgccgg

SEQ ID NO: 284 - RNA, 14 nt, synthetic construct
  variation 1..14: note = Description of Sequence: ASO sequence
  misc_feature 1..14: note = Note: the sequence may be DNA or RNA
  source 1..14: mol_type = other RNA
cccgttgtgcgccg

SEQ ID NO: 285 - RNA, 14 nt, synthetic construct
  variation 1..14: note = Description of Sequence: ASO sequence
  misc_feature 1..14: note = Note: the sequence may be DNA or RNA
  source 1..14: mol_type = other RNA
gcccgttgtgcgcc

SEQ ID NO: 286 - RNA, 14 nt, synthetic construct
  variation 1..14: note = Description of Sequence: ASO sequence
  misc_feature 1..14: note = Note: the sequence may be DNA or RNA
  source 1..14: mol_type = other RNA
cgcccgttgtgcgc

SEQ ID NO: 287 - RNA, 14 nt, synthetic construct
  variation 1..14: note = Description of Sequence: ASO sequence
  misc_feature 1..14: note = Note: the sequence may be DNA or RNA
  source 1..14: mol_type = other RNA
ccgcccgttgtgcg

SEQ ID NO: 288 - RNA, 14 nt, synthetic construct
  variation 1..14: note = Description of Sequence: ASO sequence
  misc_feature 1..14: note = Note: the sequence may be DNA or RNA
  source 1..14: mol_type = other RNA
cccgcccgttgtgc

SEQ ID NO: 289 - RNA, 14 nt, synthetic construct
  variation 1..14: note = Description of Sequence: ASO sequence
  misc_feature 1..14: note = Note: the sequence may be DNA or RNA
  source 1..14: mol_type = other RNA
acccgcccgttgtg

SEQ ID NO: 290 - RNA, 14 nt, synthetic construct
  variation 1..14: note = Description of Sequence: ASO sequence
  misc_feature 1..14: note = Note: the sequence may be DNA or RNA
  source 1..14: mol_type = other RNA
cacccgcccgttgt

SEQ ID NO: 291 - RNA, 14 nt, synthetic construct
  variation 1..14: note = Description of Sequence: ASO sequence
  misc_feature 1..14: note = Note: the sequence may be DNA or RNA
  source 1..14: mol_type = other RNA
acacccgcccgttg

SEQ ID NO: 292 - RNA, 14 nt, synthetic construct
  variation 1..14: note = Description of Sequence: ASO sequence
  misc_feature 1..14: note = Note: the sequence may be DNA or RNA
  source 1..14: mol_type = other RNA
cacacccgcccgtt

SEQ ID NO: 293 - RNA, 14 nt, synthetic construct
  variation 1..14: note = Description of Sequence: ASO sequence
  misc_feature 1..14: note = Note: the sequence may be DNA or RNA
  source 1..14: mol_type = other RNA
gcacacccgcccgt

SEQ ID NO: 294 - RNA, 14 nt, synthetic construct
  variation 1..14: note = Description of Sequence: ASO sequence
  misc_feature 1..14: note = Note: the sequence may be DNA or RNA
  source 1..14: mol_type = other RNA
tgcacacccgcccg

SEQ ID NO: 295 - RNA, 14 nt, synthetic construct
  variation 1..14: note = Description of Sequence: ASO sequence
  misc_feature 1..14: note = Note: the sequence may be DNA or RNA
  source 1..14: mol_type = other RNA
ctgcacacccgccc

SEQ ID NO: 296 - RNA, 14 nt, synthetic construct
  variation 1..14: note = Description of Sequence: ASO sequence
  misc_feature 1..14: note = Note: the sequence may be DNA or RNA
  source 1..14: mol_type = other RNA
gctgcacacccgcc

SEQ ID NO: 297 - RNA, 14 nt, synthetic construct
  variation 1..14: note = Description of Sequence: ASO sequence
  misc_feature 1..14: note = Note: the sequence may be DNA or RNA
  source 1..14: mol_type = other RNA
tgctgcacacccgc

SEQ ID NO: 298 - RNA, 14 nt, synthetic construct
  variation 1..14: note = Description of Sequence: ASO sequence
  misc_feature 1..14: note = Note: the sequence may be DNA or RNA
  source 1..14: mol_type = other RNA
gtgctgcacacccg

SEQ ID NO: 299 - RNA, 14 nt, synthetic construct
  variation 1..14: note = Description of Sequence: ASO sequence
  misc_feature 1..14: note = Note: the sequence may be DNA or RNA
  source 1..14: mol_type = other RNA
ggtgctgcacaccc

SEQ ID NO: 300 - RNA, 14 nt, synthetic construct
  variation 1..14: note = Description of Sequence: ASO sequence
  misc_feature 1..14: note = Note: the sequence may be DNA or RNA
  source 1..14: mol_type = other RNA
aggtgctgcacacc

SEQ ID NO: 301 - RNA, 14 nt, synthetic construct
  variation 1..14: note = Description of Sequence: ASO sequence
  misc_feature 1..14: note = Note: the sequence may be DNA or RNA
  source 1..14: mol_type = other RNA
caggtgctgcacac

SEQ ID NO: 302 - RNA, 14 nt, synthetic construct
  variation 1..14: note = Description of Sequence: ASO sequence
  misc_feature 1..14: note = Note: the sequence may be DNA or RNA
  source 1..14: mol_type = other RNA
ccaggtgctgcaca

SEQ ID NO: 303 - RNA, 14 nt, synthetic construct
  variation 1..14: note = Description of Sequence: ASO sequence
  misc_feature 1..14: note = Note: the sequence may be DNA or RNA
  source 1..14: mol_type = other RNA
cccaggtgctgcac

SEQ ID NO: 304 - RNA, 14 nt, synthetic construct
  variation 1..14: note = Description of Sequence: ASO sequence
  misc_feature 1..14: note = Note: the sequence may be DNA or RNA
  source 1..14: mol_type = other RNA
ccccaggtgctgca

SEQ ID NO: 305 - RNA, 14 nt, synthetic construct
  variation 1..14: note = Description of Sequence: ASO sequence
  misc_feature 1..14: note = Note: the sequence may be DNA or RNA
  source 1..14: mol_type = other RNA
gccccaggtgctgc

SEQ ID NO: 306 - RNA, 14 nt, synthetic construct
  variation 1..14: note = Description of Sequence: ASO sequence
  misc_feature 1..14: note = Note: the sequence may be DNA or RNA
  source 1..14: mol_type = other RNA
tgccccaggtgctg

SEQ ID NO: 307 - RNA, 14 nt, synthetic construct
  variation 1..14: note = Description of Sequence: ASO sequence
  misc_feature 1..14: note = Note: the sequence may be DNA or RNA
  source 1..14: mol_type = other RNA
ctgccccaggtgct

SEQ ID NO: 308 - RNA, 14 nt, synthetic construct
  variation 1..14: note = Description of Sequence: ASO sequence
  misc_feature 1..14: note = Note: the sequence may be DNA or RNA
  source 1..14: mol_type = other RNA
gctgccccaggtgc

SEQ ID NO: 309 - RNA, 14 nt, synthetic construct
  variation 1..14: note = Description of Sequence: ASO sequence
  misc_feature 1..14: note = Note: the sequence may be DNA or RNA
  source 1..14: mol_type = other RNA
agctgccccaggtg

SEQ ID NO: 310 - RNA, 14 nt, synthetic construct
  variation 1..14: note = Description of Sequence: ASO sequence
  misc_feature 1..14: note = Note: the sequence may be DNA or RNA
  source 1..14: mol_type = other RNA
aagctgccccaggt

SEQ ID NO: 311 - RNA, 14 nt, synthetic construct
  variation 1..14: note = Description of Sequence: ASO sequence
  misc_feature 1..14: note = Note: the sequence may be DNA or RNA
  source 1..14: mol_type = other RNA
gaagctgccccagg

SEQ ID NO: 312 - RNA, 14 nt, synthetic construct
  variation 1..14: note = Description of Sequence: ASO sequence
  misc_feature 1..14: note = Note: the sequence may be DNA or RNA
  source 1..14: mol_type = other RNA
ggaagctgccccag

SEQ ID NO: 313 - RNA, 14 nt, synthetic construct
  variation 1..14: note = Description of Sequence: ASO sequence
  misc_feature 1..14: note = Note: the sequence may be DNA or RNA
  source 1..14: mol_type = other RNA
tggaagctgcccca

SEQ ID NO: 314 - RNA, 14 nt, synthetic construct
  variation 1..14: note = Description of Sequence: ASO sequence
  misc_feature 1..14: note = Note: the sequence may be DNA or RNA
  source 1..14: mol_type = other RNA
gtggaagctgcccc

SEQ ID NO: 315 - RNA, 14 nt, synthetic construct
  variation 1..14: note = Description of Sequence: ASO sequence
  misc_feature 1..14: note = Note: the sequence may be DNA or RNA
  source 1..14: mol_type = other RNA
agtggaagctgccc

SEQ ID NO: 316 - RNA, 14 nt, synthetic construct
  variation 1..14: note = Description of Sequence: ASO sequence
  misc_feature 1..14: note = Note: the sequence may be DNA or RNA
  source 1..14: mol_type = other RNA
tagtggaagctgcc

SEQ ID NO: 317 - RNA, 14 nt, synthetic construct
  variation 1..14: note = Description of Sequence: ASO sequence
  misc_feature 1..14: note = Note: the sequence may be DNA or RNA
  source 1..14: mol_type = other RNA
gtagtggaagctgc

SEQ ID NO: 318 - RNA, 14 nt, synthetic construct
  variation 1..14: note = Description of Sequence: ASO sequence
  misc_feature 1..14: note = Note: the sequence may be DNA or RNA
  source 1..14: mol_type = other RNA
tgtagtggaagctg

SEQ ID NO: 319 - RNA, 14 nt, synthetic construct
  variation 1..14: note = Description of Sequence: ASO sequence
  misc_feature 1..14: note = Note: the sequence may be DNA or RNA
  source 1..14: mol_type = other RNA
ttgtagtggaagct

SEQ ID NO: 320 - RNA, 14 nt, synthetic construct
  variation 1..14: note = Description of Sequence: ASO sequence
  misc_feature 1..14: note = Note: the sequence may be DNA or RNA
  source 1..14: mol_type = other RNA
cttgtagtggaagc

SEQ ID NO: 321 - RNA, 14 nt, synthetic construct
  variation 1..14: note = Description of Sequence: ASO sequence
  misc_feature 1..14: note = Note: the sequence may be DNA or RNA
  source 1..14: mol_type = other RNA
tcttgtagtggaag

SEQ ID NO: 322 - RNA, 14 nt, synthetic construct
  variation 1..14: note = Description of Sequence: ASO sequence
  misc_feature 1..14: note = Note: the sequence may be DNA or RNA
  source 1..14: mol_type = other RNA
gtcttgtagtggaa

SEQ ID NO: 323 - RNA, 14 nt, synthetic construct
  variation 1..14: note = Description of Sequence: ASO sequence
  misc_feature 1..14: note = Note: the sequence may be DNA or RNA
  source 1..14: mol_type = other RNA
ggtcttgtagtgga

SEQ ID NO: 324 - RNA, 14 nt, synthetic construct
  variation 1..14: note = Description of Sequence: ASO sequence
  misc_feature 1..14: note = Note: the sequence may be DNA or RNA
  source 1..14: mol_type = other RNA
aggtcttgtagtgg

SEQ ID NO: 325 - RNA, 14 nt, synthetic construct
  variation 1..14: note = Description of Sequence: ASO sequence
  misc_feature 1..14: note = Note: the sequence may be DNA or RNA
  source 1..14: mol_type = other RNA
aaggtcttgtagtg

SEQ ID NO: 326 - RNA, 14 nt, synthetic construct
  variation 1..14: note = Description of Sequence: ASO sequence
  misc_feature 1..14: note = Note: the sequence may be DNA or RNA
  source 1..14: mol_type = other RNA
gaaggtcttgtagt

SEQ ID NO: 327 - RNA, 14 nt, synthetic construct
  variation 1..14: note = Description of Sequence: ASO sequence
  misc_feature 1..14: note = Note: the sequence may be DNA or RNA
  source 1..14: mol_type = other RNA
cgaaggtcttgtag

SEQ ID NO: 328 - RNA, 14 nt, synthetic construct
  variation 1..14: note = Description of Sequence: ASO sequence
  misc_feature 1..14: note = Note: the sequence may be DNA or RNA
  source 1..14: mol_type = other RNA
tcgaaggtcttgta

SEQ ID NO: 329 - RNA, 14 nt, synthetic construct
  variation 1..14: note = Description of Sequence: ASO sequence
  misc_feature 1..14: note = Note: the sequence may be DNA or RNA
  source 1..14: mol_type = other RNA
gtcgaaggtcttgt

SEQ ID NO: 330 - RNA, 14 nt, synthetic construct
  variation 1..14: note = Description of Sequence: ASO sequence
  misc_feature 1..14: note = Note: the sequence may be DNA or RNA
  source 1..14: mol_type = other RNA
cgtcgaaggtcttg

SEQ ID NO: 331 - RNA, 14 nt, synthetic construct
  variation 1..14: note = Description of Sequence: ASO sequence
  misc_feature 1..14: note = Note: the sequence may be DNA or RNA
  source 1..14: mol_type = other RNA
ccgtcgaaggtctt

SEQ ID NO: 332 - RNA, 14 nt, synthetic construct
  variation 1..14: note = Description of Sequence: ASO sequence
  misc_feature 1..14: note = Note: the sequence may be DNA or RNA
  source 1..14: mol_type = other RNA
gccgtcgaaggtct

SEQ ID NO: 333 - RNA, 14 nt, synthetic construct
  variation 1..14: note = Description of Sequence: ASO sequence
  misc_feature 1..14: note = Note: the sequence may be DNA or RNA
  source 1..14: mol_type = other RNA
cgccgtcgaaggtc

SEQ ID NO: 334 - RNA, 14 nt, synthetic construct
  variation 1..14: note = Description of Sequence: ASO sequence
  misc_feature 1..14: note = Note: the sequence may be DNA or RNA
  source 1..14: mol_type = other RNA
tcgccgtcgaaggt

SEQ ID NO: 335 - RNA, 14 nt, synthetic construct
  variation 1..14: note = Description of Sequence: ASO sequence
  misc_feature 1..14: note = Note: the sequence may be DNA or RNA
  source 1..14: mol_type = other RNA
gtcgccgtcgaagg

SEQ ID NO: 336 - RNA, 14 nt, synthetic construct
  variation 1..14: note = Description of Sequence: ASO sequence
  misc_feature 1..14: note = Note: the sequence may be DNA or RNA
  source 1..14: mol_type = other RNA
cgtcgccgtcgaag

SEQ ID NO: 337 - RNA, 14 nt, synthetic construct
  variation 1..14: note = Description of Sequence: ASO sequence
  misc_feature 1..14: note = Note: the sequence may be DNA or RNA
  source 1..14: mol_type = other RNA
acgtcgccgtcgaa

SEQ ID NO: 338 - RNA, 14 nt, synthetic construct
  variation 1..14: note = Description of Sequence: ASO sequence
  misc_feature 1..14: note = Note: the sequence may be DNA or RNA
  source 1..14: mol_type = other RNA
gacgtcgccgtcga

SEQ ID NO: 339 - RNA, 14 nt, synthetic construct
  variation 1..14: note = Description of Sequence: ASO sequence
  misc_feature 1..14: note = Note: the sequence may be DNA or RNA
  source 1..14: mol_type = other RNA
agacgtcgccgtcg

SEQ ID NO: 340 - RNA, 14 nt, synthetic construct
  variation 1..14: note = Description of Sequence: ASO sequence
  misc_feature 1..14: note = Note: the sequence may be DNA or RNA
  source 1..14: mol_type = other RNA
aagacgtcgccgtc

SEQ ID NO: 341 - RNA, 14 nt, synthetic construct
  variation 1..14: note = Description of Sequence: ASO sequence
  misc_feature 1..14: note = Note: the sequence may be DNA or RNA
  source 1..14: mol_type = other RNA
gaagacgtcgccgt

SEQ ID NO: 342 - RNA, 14 nt, synthetic construct
  variation 1..14: note = Description of Sequence: ASO sequence
  misc_feature 1..14: note = Note: the sequence may be DNA or RNA
  source 1..14: mol_type = other RNA
ggaagacgtcgccg

SEQ ID NO: 343 - RNA, 14 nt, synthetic construct
  variation 1..14: note = Description of Sequence: ASO sequence
  misc_feature 1..14: note = Note: the sequence may be DNA or RNA
  source 1..14: mol_type = other RNA
cggaagacgtcgcc

SEQ ID NO: 344 - RNA, 14 nt, synthetic construct
  variation 1..14: note = Description of Sequence: ASO sequence
  misc_feature 1..14: note = Note: the sequence may be DNA or RNA
  source 1..14: mol_type = other RNA
gcggaagacgtcgc

SEQ ID NO: 345 - RNA, 14 nt, synthetic construct
  variation 1..14: note = Description of Sequence: ASO sequence
  misc_feature 1..14: note = Note: the sequence may be DNA or RNA
  source 1..14: mol_type = other RNA
agcggaagacgtcg

SEQ ID NO: 346 - RNA, 14 nt, synthetic construct
  variation 1..14: note = Description of Sequence: ASO sequence
  misc_feature 1..14: note = Note: the sequence may be DNA or RNA
  source 1..14: mol_type = other RNA
aagcggaagacgtc

SEQ ID NO: 347 - RNA, 14 nt, synthetic construct
  variation 1..14: note = Description of Sequence: ASO sequence
  misc_feature 1..14: note = Note: the sequence may be DNA or RNA
  source 1..14: mol_type = other RNA
gaagcggaagacgt

SEQ ID NO: 348 - RNA, 14 nt, synthetic construct
  variation 1..14: note = Description of Sequence: ASO sequence
  misc_feature 1..14: note = Note: the sequence may be DNA or RNA
  source 1..14: mol_type = other RNA
ggaagcggaagacg

SEQ ID NO: 349 - RNA, 14 nt, synthetic construct
  variation 1..14: note = Description of Sequence: ASO sequence
  misc_feature 1..14: note = Note: the sequence may be DNA or RNA
  source 1..14: mol_type = other RNA
gggaagcggaagac

SEQ ID NO: 350 - RNA, 14 nt, synthetic construct
  variation 1..14: note = Description of Sequence: ASO sequence
  misc_feature 1..14: note = Note: the sequence may be DNA or RNA
  source 1..14: mol_type = other RNA
ggggaagcggaaga

SEQ ID NO: 351 - RNA, 14 nt, synthetic construct
  variation 1..14: note = Description of Sequence: ASO sequence
  misc_feature 1..14: note = Note: the sequence may be DNA or RNA
  source 1..14: mol_type = other RNA
cggggaagcggaag

SEQ ID NO: 352 - RNA, 14 nt, synthetic construct
  variation 1..14: note = Description of Sequence: ASO sequence
  misc_feature 1..14: note = Note: the sequence may be DNA or RNA
  source 1..14: mol_type = other RNA
ccggggaagcggaa

SEQ ID NO: 353 - RNA, 14 nt, synthetic construct
  variation 1..14: note = Description of Sequence: ASO sequence
  misc_feature 1..14: note = Note: the sequence may be DNA or RNA
  source 1..14: mol_type = other RNA
gccggggaagcgga

SEQ ID NO: 354 - RNA, 14 nt, synthetic construct
  variation 1..14: note = Description of Sequence: ASO sequence
  misc_feature 1..14: note = Note: the sequence may be DNA or RNA
  source 1..14: mol_type = other RNA
ggccggggaagcgg

SEQ ID NO: 355 - RNA, 14 nt, synthetic construct
  variation 1..14: note = Description of Sequence: ASO sequence
  misc_feature 1..14: note = Note: the sequence may be DNA or RNA
  source 1..14: mol_type = other RNA
aggccggggaagcg

SEQ ID NO: 356 - RNA, 14 nt, synthetic construct
  variation 1..14: note = Description of Sequence: ASO sequence
  misc_feature 1..14: note = Note: the sequence may be DNA or RNA
  source 1..14: mol_type = other RNA
gaggccggggaagc

SEQ ID NO: 357 - RNA, 14 nt, synthetic construct
  variation 1..14: note = Description of Sequence: ASO sequence
  misc_feature 1..14: note = Note: the sequence may be DNA or RNA
  source 1..14: mol_type = other RNA
agaggccggggaag

SEQ ID NO: 358 - RNA, 14 nt, synthetic construct
  variation 1..14: note = Description of Sequence: ASO sequence
  misc_feature 1..14: note = Note: the sequence may be DNA or RNA
  source 1..14: mol_type = other RNA
cagaggccggggaa

SEQ ID NO: 359 - RNA, 14 nt, synthetic construct
  variation 1..14: note = Description of Sequence: ASO sequence
  misc_feature 1..14: note = Note: the sequence may be DNA or RNA
  source 1..14: mol_type = other RNA
gcagaggccgggga

SEQ ID NO: 360 - RNA, 14 nt, synthetic construct
  variation 1..14: note = Description of Sequence: ASO sequence
  misc_feature 1..14: note = Note: the sequence may be DNA or RNA
  source 1..14: mol_type = other RNA
tgcagaggccgggg

SEQ ID NO: 361 - RNA, 14 nt, synthetic construct
  variation 1..14: note = Description of Sequence: ASO sequence
  misc_feature 1..14: note = Note: the sequence may be DNA or RNA
  source 1..14: mol_type = other RNA
ttgcagaggccggg

SEQ ID NO: 362 - RNA, 14 nt, synthetic construct
  variation 1..14: note = Description of Sequence: ASO sequence
  misc_feature 1..14: note = Note: the sequence may be DNA or RNA
  source 1..14: mol_type = other RNA
gttgcagaggccgg

SEQ ID NO: 363 - RNA, 14 nt, synthetic construct
  variation 1..14: note = Description of Sequence: ASO sequence
  misc_feature 1..14: note = Note: the sequence may be DNA or RNA
  source 1..14: mol_type = other RNA
agttgcagaggccg

SEQ ID NO: 364 - RNA, 14 nt, synthetic construct
  variation 1..14: note = Description of Sequence: ASO sequence
  misc_feature 1..14: note = Note: the sequence may be DNA or RNA
  source 1..14: mol_type = other RNA
tagttgcagaggcc

SEQ ID NO: 365 - RNA, 14 nt, synthetic construct
  variation 1..14: note = Description of Sequence: ASO sequence
  misc_feature 1..14: note = Note: the sequence may be DNA or RNA
  source 1..14: mol_type = other RNA
gtagttgcagaggc

SEQ ID NO: 366 - RNA, 14 nt, synthetic construct
  variation 1..14: note = Description of Sequence: ASO sequence
  misc_feature 1..14: note = Note: the sequence may be DNA or RNA
  source 1..14: mol_type = other RNA
cgtagttgcagagg

SEQ ID NO: 367 - RNA, 14 nt, synthetic construct
  variation 1..14: note = Description of Sequence: ASO sequence
  misc_feature 1..14: note = Note: the sequence may be DNA or RNA
  source 1..14: mol_type = other RNA
acgtagttgcagag

SEQ ID NO: 368 - RNA, 14 nt, synthetic construct
  variation 1..14: note = Description of Sequence: ASO sequence
  misc_feature 1..14: note = Note: the sequence may be DNA or RNA
  source 1..14: mol_type = other RNA
cacgtagttgcaga

SEQ ID NO: 369 - RNA, 14 nt, synthetic construct
  variation 1..14: note = Description of Sequence: ASO sequence
  misc_feature 1..14: note = Note: the sequence may be DNA or RNA
  source 1..14: mol_type = other RNA
acacgtagttgcag

SEQ ID NO: 370 - RNA, 14 nt, synthetic construct
  variation 1..14: note = Description of Sequence: ASO sequence
  misc_feature 1..14: note = Note: the sequence may be DNA or RNA
  source 1..14: mol_type = other RNA
aacacgtagttgca

SEQ ID NO: 371 - RNA, 14 nt, synthetic construct
  variation 1..14: note = Description of Sequence: ASO sequence
  misc_feature 1..14: note = Note: the sequence may be DNA or RNA
  source 1..14: mol_type = other RNA
gaacacgtagttgc

SEQ ID NO: 372 - RNA, 14 nt, synthetic construct
  variation 1..14: note = Description of Sequence: ASO sequence
  misc_feature 1..14: note = Note: the sequence may be DNA or RNA
  source 1..14: mol_type = other RNA
agaacacgtagttg

SEQ ID NO: 373 - RNA, 14 nt, synthetic construct
  variation 1..14: note = Description of Sequence: ASO sequence
  misc_feature 1..14: note = Note: the sequence may be DNA or RNA
  source 1..14: mol_type = other RNA
gagaacacgtagtt

SEQ ID NO: 374 - RNA, 14 nt, synthetic construct
  variation 1..14: note = Description of Sequence: ASO sequence
  misc_feature 1..14: note = Note: the sequence may be DNA or RNA
  source 1..14: mol_type = other RNA
ggagaacacgtagt

SEQ ID NO: 375 - RNA, 14 nt, synthetic construct
  variation 1..14: note = Description of Sequence: ASO sequence
  misc_feature 1..14: note = Note: the sequence may be DNA or RNA
  source 1..14: mol_type = other RNA
cggagaacacgtag

SEQ ID NO: 376 - RNA, 14 nt, synthetic construct
  variation 1..14: note = Description of Sequence: ASO sequence
  misc_feature 1..14: note = Note: the sequence may be DNA or RNA
  source 1..14: mol_type = other RNA
tcggagaacacgta

SEQ ID NO: 377 - RNA, 14 nt, synthetic construct
  variation 1..14: note = Description of Sequence: ASO sequence
  misc_feature 1..14: note = Note: the sequence may be DNA or RNA
  source 1..14: mol_type = other RNA
ctcggagaacacgt

SEQ ID NO: 378 - RNA, 14 nt, synthetic construct
  variation 1..14: note = Description of Sequence: ASO sequence
  misc_feature 1..14: note = Note: the sequence may be DNA or RNA
  source 1..14: mol_type = other RNA
gctcggagaacacg

SEQ ID NO: 379 - RNA, 14 nt, synthetic construct
  variation 1..14: note = Description of Sequence: ASO sequence
  misc_feature 1..14: note = Note: the sequence may be DNA or RNA
  source 1..14: mol_type = other RNA
tgctcggagaacac

SEQ ID NO: 380 - RNA, 14 nt, synthetic construct
  variation 1..14: note = Description of Sequence: ASO sequence
  misc_feature 1..14: note = Note: the sequence may be DNA or RNA
  source 1..14: mol_type = other RNA
gtgctcggagaaca

SEQ ID NO: 381 - RNA, 14 nt, synthetic construct
  variation 1..14: note = Description of Sequence: ASO sequence
  misc_feature 1..14: note = Note: the sequence may be DNA or RNA
  source 1..14: mol_type = other RNA
agtgctcggagaac

SEQ ID NO: 382 - RNA, 14 nt, synthetic construct
  variation 1..14: note = Description of Sequence: ASO sequence
  misc_feature 1..14: note = Note: the sequence may be DNA or RNA
  source 1..14: mol_type = other RNA
cagtgctcggagaa

SEQ ID NO: 383 - RNA, 14 nt, synthetic construct
  variation 1..14: note = Description of Sequence: ASO sequence
  misc_feature 1..14: note = Note: the sequence may be DNA or RNA
  source 1..14: mol_type = other RNA
gcagtgctcggaga

SEQ ID NO: 384 - RNA, 14 nt, synthetic construct
  variation 1..14: note = Description of Sequence: ASO sequence
  misc_feature 1..14: note = Note: the sequence may be DNA or RNA
  source 1..14: mol_type = other RNA
cgcagtgctcggag

SEQ ID NO: 385 - RNA, 14 nt, synthetic construct
  variation 1..14: note = Description of Sequence: ASO sequence
  misc_feature 1..14: note = Note: the sequence may be DNA or RNA
  source 1..14: mol_type = other RNA
ccgcagtgctcgga

SEQ ID NO: 386 - RNA, 14 nt, synthetic construct
  variation 1..14: note = Description of Sequence: ASO sequence
  misc_feature 1..14: note = Note: the sequence may be DNA or RNA
  source 1..14: mol_type = other RNA
accgcagtgctcgg

SEQ ID NO: 387 - RNA, 14 nt, synthetic construct
  variation 1..14: note = Description of Sequence: ASO sequence
  misc_feature 1..14: note = Note: the sequence may be DNA or RNA
  source 1..14: mol_type = other RNA
caccgcagtgctcg

SEQ ID NO: 388 - RNA, 14 nt, synthetic construct
  variation 1..14: note = Description of Sequence: ASO sequence
  misc_feature 1..14: note = Note: the sequence may be DNA or RNA
  source 1..14: mol_type = other RNA
gcaccgcagtgctc

SEQ ID NO: 389 - RNA, 14 nt, synthetic construct
  variation 1..14: note = Description of Sequence: ASO sequence
  misc_feature 1..14: note = Note: the sequence may be DNA or RNA
  source 1..14: mol_type = other RNA
ggcaccgcagtgct

SEQ ID NO: 390 - RNA, 14 nt, synthetic construct
  variation 1..14: note = Description of Sequence: ASO sequence
  misc_feature 1..14: note = Note: the sequence may be DNA or RNA
  source 1..14: mol_type = other RNA
cggcaccgcagtgc

SEQ ID NO: 391 - RNA, 14 nt, synthetic construct
  variation 1..14: note = Description of Sequence: ASO sequence
  misc_feature 1..14: note = Note: the sequence may be DNA or RNA
  source 1..14: mol_type = other RNA
gcggcaccgcagtg

SEQ ID NO: 392 - RNA, 14 nt, synthetic construct
  variation 1..14: note = Description of Sequence: ASO sequence
  misc_feature 1..14: note = Note: the sequence may be DNA or RNA
  source 1..14: mol_type = other RNA
ggcggcaccgcagt

SEQ ID NO: 393 - RNA, 14 nt, synthetic construct
  variation 1..14: note = Description of Sequence: ASO sequence
  misc_feature 1..14: note = Note: the sequence may be DNA or RNA
  source 1..14: mol_type = other RNA
aggcggcaccgcag

SEQ ID NO: 394 - RNA, 14 nt, synthetic construct
  variation 1..14: note = Description of Sequence: ASO sequence
  misc_feature 1..14: note = Note: the sequence may be DNA or RNA
  source 1..14: mol_type = other RNA
taggcggcaccgca

SEQ ID NO: 395 - RNA, 14 nt, synthetic construct
  variation 1..14: note = Description of Sequence: ASO sequence
  misc_feature 1..14: note = Note: the sequence may be DNA or RNA
  source 1..14: mol_type = other RNA
gtaggcggcaccgc

SEQ ID NO: 396 - RNA, 14 nt, synthetic construct
  variation 1..14: note = Description of Sequence: ASO sequence
  misc_feature 1..14: note = Note: the sequence may be DNA or RNA
  source 1..14: mol_type = other RNA
cgtaggcggcaccg

SEQ ID NO: 397 - RNA, 14 nt, synthetic construct
  variation 1..14: note = Description of Sequence: ASO sequence
  misc_feature 1..14: note = Note: the sequence may be DNA or RNA
  source 1..14: mol_type = other RNA
tcgtaggcggcacc

SEQ ID NO: 398 - RNA, 14 nt, synthetic construct
  variation 1..14: note = Description of Sequence: ASO sequence
  misc_feature 1..14: note = Note: the sequence may be DNA or RNA
  source 1..14: mol_type = other RNA
ctcgtaggcggcac

SEQ ID NO: 399 - RNA, 14 nt, synthetic construct
  variation 1..14: note = Description of Sequence: ASO sequence
  misc_feature 1..14: note = Note: the sequence may be DNA or RNA
  source 1..14: mol_type = other RNA
cctcgtaggcggca

SEQ ID NO: 400 - RNA, 14 nt, synthetic construct
  variation 1..14: note = Description of Sequence: ASO sequence
  misc_feature 1..14: note = Note: the sequence may be DNA or RNA
  source 1..14: mol_type = other RNA
tcctcgtaggcggc

SEQ ID NO: 401 - RNA, 14 nt, synthetic construct
  variation 1..14: note = Description of Sequence: ASO sequence
  misc_feature 1..14: note = Note: the sequence may be DNA or RNA
  source 1..14: mol_type = other RNA
atcctcgtaggcgg

SEQ ID NO: 402 - RNA, 14 nt, synthetic construct
  variation 1..14: note = Description of Sequence: ASO sequence
  misc_feature 1..14: note = Note: the sequence may be DNA or RNA
  source 1..14: mol_type = other RNA
aatcctcgtaggcg

SEQ ID NO: 403 - RNA, 14 nt, synthetic construct
  variation 1..14: note = Description of Sequence: ASO sequence
  misc_feature 1..14: note = Note: the sequence may be DNA or RNA
  source 1..14: mol_type = other RNA
aaatcctcgtaggc

SEQ ID NO: 404 - RNA, 14 nt, synthetic construct
  variation 1..14: note = Description of Sequence: ASO sequence
  misc_feature 1..14: note = Note: the sequence may be DNA or RNA
  source 1..14: mol_type = other RNA
aaaatcctcgtagg

SEQ ID NO: 405 - RNA, 14 nt, synthetic construct
  variation 1..14: note = Description of Sequence: ASO sequence
  misc_feature 1..14: note = Note: the sequence may be DNA or RNA
  source 1..14: mol_type = other RNA
taaaatcctcgtag

SEQ ID NO: 406 - RNA, 14 nt, synthetic construct
  variation 1..14: note = Description of Sequence: ASO sequence
  misc_feature 1..14: note = Note: the sequence may be DNA or RNA
  source 1..14: mol_type = other RNA
ttaaaatcctcgta

SEQ ID NO: 407 - RNA, 14 nt, synthetic construct
  variation 1..14: note = Description of Sequence: ASO sequence
  misc_feature 1..14: note = Note: the sequence may be DNA or RNA
  source 1..14: mol_type = other RNA
gttaaaatcctcgt

SEQ ID NO: 408 - RNA, 14 nt, synthetic construct
  variation 1..14: note = Description of Sequence: ASO sequence
  misc_feature 1..14: note = Note: the sequence may be DNA or RNA
  source 1..14: mol_type = other RNA
tgttaaaatcctcg

SEQ ID NO: 409 - RNA, 14 nt, synthetic construct
  variation 1..14: note = Description of Sequence: ASO sequence
  misc_feature 1..14: note = Note: the sequence may be DNA or RNA
  source 1..14: mol_type = other RNA
atgttaaaatcctc

SEQ ID NO: 410 - RNA, 14 nt, synthetic construct
  variation 1..14: note = Description of Sequence: ASO sequence
  misc_feature 1..14: note = Note: the sequence may be DNA or RNA
  source 1..14: mol_type = other RNA
gatgttaaaatcct

SEQ ID NO: 411 - RNA, 14 nt, synthetic construct
  variation 1..14: note = Description of Sequence: ASO sequence
  misc_feature 1..14: note = Note: the sequence may be DNA or RNA
  source 1..14: mol_type = other RNA
ggatgttaaaatcc

SEQ ID NO: 412 - RNA, 14 nt, synthetic construct
  variation 1..14: note = Description of Sequence: ASO sequence
  misc_feature 1..14: note = Note: the sequence may be DNA or RNA
  source 1..14: mol_type = other RNA
tggatgttaaaatc

SEQ ID NO: 413 - RNA, 14 nt, synthetic construct
  variation 1..14: note = Description of Sequence: ASO sequence
  misc_feature 1..14: note = Note: the sequence may be DNA or RNA
  source 1..14: mol_type = other RNA
ctggatgttaaaat

SEQ ID NO: 414 - RNA, 14 nt, synthetic construct
  variation 1..14: note = Description of Sequence: ASO sequence
  misc_feature 1..14: note = Note: the sequence may be DNA or RNA
  source 1..14: mol_type = other RNA
gctggatgttaaaa

SEQ ID NO: 415 - RNA, 14 nt, synthetic construct
  variation 1..14: note = Description of Sequence: ASO sequence
  misc_feature 1..14: note = Note: the sequence may be DNA or RNA
  source 1..14: mol_type = other RNA
agctggatgttaaa

SEQ ID NO: 416 - RNA, 14 nt, synthetic construct
  variation 1..14: note = Description of Sequence: ASO sequence
  misc_feature 1..14: note = Note: the sequence may be DNA or RNA
  source 1..14: mol_type = other RNA
tagctggatgttaa

SEQ ID NO: 417 - RNA, 14 nt, synthetic construct
  variation 1..14: note = Description of Sequence: ASO sequence
  misc_feature 1..14: note = Note: the sequence may be DNA or RNA
  source 1..14: mol_type = other RNA
gtagctggatgtta

SEQ ID NO: 418 - RNA, 14 nt, synthetic construct
  variation 1..14: note = Description of Sequence: ASO sequence
  misc_feature 1..14: note = Note: the sequence may be DNA or RNA
  source 1..14: mol_type = other RNA
cgtagctggatgtt

SEQ ID NO: 419 - RNA, 14 nt, synthetic construct
  variation 1..14: note = Description of Sequence: ASO sequence
  misc_feature 1..14: note = Note: the sequence may be DNA or RNA
  source 1..14: mol_type = other RNA
gcgtagctggatgt

SEQ ID NO: 420 - RNA, 14 nt, synthetic construct
  variation 1..14: note = Description of Sequence: ASO sequence
  misc_feature 1..14: note = Note: the sequence may be DNA or RNA
  source 1..14: mol_type = other RNA
ggcgtagctggatg

SEQ ID NO: 421 - RNA, 14 nt, synthetic construct
  variation 1..14: note = Description of Sequence: ASO sequence
  misc_feature 1..14: note = Note: the sequence may be DNA or RNA
  source 1..14: mol_type = other RNA
cggcgtagctggat

SEQ ID NO: 422 - RNA, 14 nt, synthetic construct
  variation 1..14: note = Description of Sequence: ASO sequence
  misc_feature 1..14: note = Note: the sequence may be DNA or RNA
  source 1..14: mol_type = other RNA
gcggcgtagctgga

SEQ ID NO: 423 - RNA, 14 nt, synthetic construct
  variation 1..14: note = Description of Sequence: ASO sequence
  misc_feature 1..14: note = Note: the sequence may be DNA or RNA
  source 1..14: mol_type = other RNA
tgcggcgtagctgg

SEQ ID NO: 424 - RNA, 14 nt, synthetic construct
  variation 1..14: note = Description of Sequence: ASO sequence
  misc_feature 1..14: note = Note: the sequence may be DNA or RNA
  source 1..14: mol_type = other RNA
ctgcggcgtagctg

SEQ ID NO: 425 - RNA, 14 nt, synthetic construct
  variation 1..14: note = Description of Sequence: ASO sequence
  misc_feature 1..14: note = Note: the sequence may be DNA or RNA
  source 1..14: mol_type = other RNA
gctgcggcgtagct

SEQ ID NO: 426 - RNA, 14 nt, synthetic construct
  variation 1..14: note = Description of Sequence: ASO sequence
  misc_feature 1..14: note = Note: the sequence may be DNA or RNA
  source 1..14: mol_type = other RNA
ggctgcggcgtagc

SEQ ID NO: 427 - RNA, 14 nt, synthetic construct
  variation 1..14: note = Description of Sequence: ASO sequence
  misc_feature 1..14: note = Note: the sequence may be DNA or RNA
  source 1..14: mol_type = other RNA
tggctgcggcgtag

SEQ ID NO: 428 - RNA, 14 nt, synthetic construct
  variation 1..14: note = Description of Sequence: ASO sequence
  misc_feature 1..14: note = Note: the sequence may be DNA or RNA
  source 1..14: mol_type = other RNA
ctggctgcggcgta

SEQ ID NO: 429 - RNA, 14 nt, synthetic construct
  variation 1..14: note = Description of Sequence: ASO sequence
  misc_feature 1..14: note = Note: the sequence may be DNA or RNA
  source 1..14: mol_type = other RNA
cctggctgcggcgt

SEQ ID NO: 430 - RNA, 14 nt, synthetic construct
  variation 1..14: note = Description of Sequence: ASO sequence
  misc_feature 1..14: note = Note: the sequence may be DNA or RNA
  source 1..14: mol_type = other RNA
tcctggctgcggcg

SEQ ID NO: 431 - RNA, 14 nt, synthetic construct
  variation 1..14: note = Description of Sequence: ASO sequence
  misc_feature 1..14: note = Note: the sequence may be DNA or RNA
  source 1..14: mol_type = other RNA
ctcctggctgcggc

SEQ ID NO: 432 - RNA, 14 nt, synthetic construct
  variation 1..14: note = Description of Sequence: ASO sequence
  misc_feature 1..14: note = Note: the sequence may be DNA or RNA
  source 1..14: mol_type = other RNA
actcctggctgcgg

SEQ ID NO: 433 - RNA, 14 nt, synthetic construct
  variation 1..14: note = Description of Sequence: ASO sequence
  misc_feature 1..14: note = Note: the sequence may be DNA or RNA
  source 1..14: mol_type = other RNA
gactcctggctgcg

SEQ ID NO: 434 - RNA, 14 nt, synthetic construct
  variation 1..14: note = Description of Sequence: ASO sequence
  misc_feature 1..14: note = Note: the sequence may be DNA or RNA
  source 1..14: mol_type = other RNA
tgactcctggctgc

SEQ ID NO: 435 - RNA, 14 nt, synthetic construct
  variation 1..14: note = Description of Sequence: ASO sequence
  misc_feature 1..14: note = Note: the sequence may be DNA or RNA
  source 1..14: mol_type = other RNA
ctgactcctggctg

SEQ ID NO: 436 - RNA, 14 nt, synthetic construct
  variation 1..14: note = Description of Sequence: ASO sequence
  misc_feature 1..14: note = Note: the sequence may be DNA or RNA
  source 1..14: mol_type = other RNA
gctgactcctggct

SEQ ID NO: 437 - RNA, 14 nt, synthetic construct
  variation 1..14: note = Description of Sequence: ASO sequence
  misc_feature 1..14: note = Note: the sequence may be DNA or RNA
  source 1..14: mol_type = other RNA
cgctgactcctggc

SEQ ID NO: 438 - RNA, 14 nt, synthetic construct
  variation 1..14: note = Description of Sequence: ASO sequence
  misc_feature 1..14: note = Note: the sequence may be DNA or RNA
  source 1..14: mol_type = other RNA
ccgctgactcctgg

SEQ ID NO: 439 - RNA, 14 nt, synthetic construct
  variation 1..14: note = Description of Sequence: ASO sequence
  misc_feature 1..14: note = Note: the sequence may be DNA or RNA
  source 1..14: mol_type = other RNA
gccgctgactcctg

SEQ ID NO: 440 - RNA, 14 nt, synthetic construct
  variation 1..14: note = Description of Sequence: ASO sequence
  misc_feature 1..14: note = Note: the sequence may be DNA or RNA
  source 1..14: mol_type = other RNA
ggccgctgactcct

SEQ ID NO: 441 - RNA, 14 nt, synthetic construct
  variation 1..14: note = Description of Sequence: ASO sequence
  misc_feature 1..14: note = Note: the sequence may be DNA or RNA
  source 1..14: mol_type = other RNA
gggccgctgactcc

SEQ ID NO: 442 - RNA, 14 nt, synthetic construct
  variation 1..14: note = Description of Sequence: ASO sequence
  misc_feature 1..14: note = Note: the sequence may be DNA or RNA
  source 1..14: mol_type = other RNA
ggggccgctgactc

SEQ ID NO: 443 - RNA, 14 nt, synthetic construct
  variation 1..14: note = Description of Sequence: ASO sequence
  misc_feature 1..14: note = Note: the sequence may be DNA or RNA
  source 1..14: mol_type = other RNA
gggggccgctgact

SEQ ID NO: 444 - RNA, 14 nt, synthetic construct
  variation 1..14: note = Description of Sequence: ASO sequence
  misc_feature 1..14: note = Note: the sequence may be DNA or RNA
  source 1..14: mol_type = other RNA
tgggggccgctgac

SEQ ID NO: 445 - RNA, 14 nt, synthetic construct
  variation 1..14: note = Description of Sequence: ASO sequence
  misc_feature 1..14: note = Note: the sequence may be DNA or RNA
  source 1..14: mol_type = other RNA
gtgggggccgctga

SEQ ID NO: 446 - RNA, 14 nt, synthetic construct
  variation 1..14: note = Description of Sequence: ASO sequence
  misc_feature 1..14: note = Note: the sequence may be DNA or RNA
  source 1..14: mol_type = other RNA
cgtgggggccgctg

SEQ ID NO: 447 - RNA, 14 nt, synthetic construct
  variation 1..14: note = Description of Sequence: ASO sequence
  misc_feature 1..14: note = Note: the sequence may be DNA or RNA
  source 1..14: mol_type = other RNA
gcgtgggggccgct

SEQ ID NO: 448 - RNA, 14 nt, synthetic construct
  variation 1..14: note = Description of Sequence: ASO sequence
  misc_feature 1..14: note = Note: the sequence may be DNA or RNA
  source 1..14: mol_type = other RNA
agcgtgggggccgc

SEQ ID NO: 449 - RNA, 14 nt, synthetic construct
  variation 1..14: note = Description of Sequence: ASO sequence
  misc_feature 1..14: note = Note: the sequence may be DNA or RNA
  source 1..14: mol_type = other RNA
cagcgtgggggccg

SEQ ID NO: 450 - RNA, 14 nt, synthetic construct
  variation 1..14: note = Description of Sequence: ASO sequence
  misc_feature 1..14: note = Note: the sequence may be DNA or RNA
  source 1..14: mol_type = other RNA
tcagcgtgggggcc

SEQ ID NO: 451 - RNA, 14 nt, synthetic construct
  variation 1..14: note = Description of Sequence: ASO sequence
  misc_feature 1..14: note = Note: the sequence may be DNA or RNA
  source 1..14: mol_type = other RNA
ctcagcgtgggggc

SEQ ID NO: 452 - RNA, 14 nt, synthetic construct
  variation 1..14: note = Description of Sequence: ASO sequence
  misc_feature 1..14: note = Note: the sequence may be DNA or RNA
  source 1..14: mol_type = other RNA
gctcagcgtggggg

SEQ ID NO: 453 - RNA, 14 nt, synthetic construct
  variation 1..14: note = Description of Sequence: ASO sequence
  misc_feature 1..14: note = Note: the sequence may be DNA or RNA
  source 1..14: mol_type = other RNA
tgctcagcgtgggg

SEQ ID NO: 454 - RNA, 14 nt, synthetic construct
  variation 1..14: note = Description of Sequence: ASO sequence
  misc_feature 1..14: note = Note: the sequence may be DNA or RNA
  source 1..14: mol_type = other RNA
ctgctcagcgtggg

SEQ ID NO: 455 - RNA, 14 nt, synthetic construct
  variation 1..14: note = Description of Sequence: ASO sequence
  misc_feature 1..14: note = Note: the sequence may be DNA or RNA
  source 1..14: mol_type = other RNA
cctgctcagcgtgg

SEQ ID NO: 456 - RNA, 14 nt, synthetic construct
  variation 1..14: note = Description of Sequence: ASO sequence
  misc_feature 1..14: note = Note: the sequence may be DNA or RNA
  source 1..14: mol_type = other RNA
ccctgctcagcgtg

SEQ ID NO: 457 - RNA, 14 nt, synthetic construct
  variation 1..14: note = Description of Sequence: ASO sequence
  misc_feature 1..14: note = Note: the sequence may be DNA or RNA
  source 1..14: mol_type = other RNA
accctgctcagcgt

SEQ ID NO: 458 - RNA, 14 nt, synthetic construct
  variation 1..14: note = Description of Sequence: ASO sequence
  misc_feature 1..14: note = Note: the sequence may be DNA or RNA
  source 1..14: mol_type = other RNA
gaccctgctcagcg

SEQ ID NO: 459 - RNA, 14 nt, synthetic construct
  variation 1..14: note = Description of Sequence: ASO sequence
  misc_feature 1..14: note = Note: the sequence may be DNA or RNA
  source 1..14: mol_type = other RNA
ggaccctgctcagc

SEQ ID NO: 460 - RNA, 14 nt, synthetic construct
  variation 1..14: note = Description of Sequence: ASO sequence
  misc_feature 1..14: note = Note: the sequence may be DNA or RNA
  source 1..14: mol_type = other RNA
aggaccctgctcag

SEQ ID NO: 461 - RNA, 14 nt, synthetic construct
  variation 1..14: note = Description of Sequence: ASO sequence
  misc_feature 1..14: note = Note: the sequence may be DNA or RNA
  source 1..14: mol_type = other RNA
gaggaccctgctca

SEQ ID NO: 462 - RNA, 14 nt, synthetic construct
  variation 1..14: note = Description of Sequence: ASO sequence
  misc_feature 1..14: note = Note: the sequence may be DNA or RNA
  source 1..14: mol_type = other RNA
tgaggaccctgctc

SEQ ID NO: 463 - RNA, 14 nt, synthetic construct
  variation 1..14: note = Description of Sequence: ASO sequence
  misc_feature 1..14: note = Note: the sequence may be DNA or RNA
  source 1..14: mol_type = other RNA
atgaggaccctgct

SEQ ID NO: 464 - RNA, 14 nt, synthetic construct
  variation 1..14: note = Description of Sequence: ASO sequence
  misc_feature 1..14: note = Note: the sequence may be DNA or RNA
  source 1..14: mol_type = other RNA
catgaggaccctgc

SEQ ID NO: 465 - RNA, 14 nt, synthetic construct
  variation 1..14: note = Description of Sequence: ASO sequence
  misc_feature 1..14: note = Note: the sequence may be DNA or RNA
  source 1..14: mol_type = other RNA
tcatgaggaccctg

SEQ ID NO: 466 - RNA, 14 nt, synthetic construct
  variation 1..14: note = Description of Sequence: ASO sequence
  misc_feature 1..14: note = Note: the sequence may be DNA or RNA
  source 1..14: mol_type = other RNA
ttcatgaggaccct

SEQ ID NO: 467 - RNA, 14 nt, synthetic construct
  variation 1..14: note = Description of Sequence: ASO sequence
  misc_feature 1..14: note = Note: the sequence may be DNA or RNA
  source 1..14: mol_type = other RNA
cttcatgaggaccc

SEQ ID NO: 468 - RNA, 14 nt, synthetic construct
  variation 1..14: note = Description of Sequence: ASO sequence
  misc_feature 1..14: note = Note: the sequence may be DNA or RNA
  source 1..14: mol_type = other RNA
ccttcatgaggacc

SEQ ID NO: 469 - RNA, 14 nt, synthetic construct
  variation 1..14: note = Description of Sequence: ASO sequence
  misc_feature 1..14: note = Note: the sequence may be DNA or RNA
  source 1..14: mol_type = other RNA
accttcatgaggac

SEQ ID NO: 470 - RNA, 14 nt, synthetic construct
  variation 1..14: note = Description of Sequence: ASO sequence
  misc_feature 1..14: note = Note: the sequence may be DNA or RNA
  source 1..14: mol_type = other RNA
caccttcatgagga

SEQ ID NO: 471 - RNA, 14 nt, synthetic construct
  variation 1..14: note = Description of Sequence: ASO sequence
  misc_feature 1..14: note = Note: the sequence may be DNA or RNA
  source 1..14: mol_type = other RNA
ccaccttcatgagg

SEQ ID NO: 472 - RNA, 14 nt, synthetic construct
  variation 1..14: note = Description of Sequence: ASO sequence
  misc_feature 1..14: note = Note: the sequence may be DNA or RNA
  source 1..14: mol_type = other RNA
tccaccttcatgag

SEQ ID NO: 473 - RNA, 14 nt, synthetic construct
  variation 1..14: note = Description of Sequence: ASO sequence
  misc_feature 1..14: note = Note: the sequence may be DNA or RNA
  source 1..14: mol_type = other RNA
atccaccttcatga

SEQ ID NO: 474 - RNA, 14 nt, synthetic construct
  variation 1..14: note = Description of Sequence: ASO sequence
  misc_feature 1..14: note = Note: the sequence may be DNA or RNA
  source 1..14: mol_type = other RNA
catccaccttcatg

SEQ ID NO: 475 - RNA, 14 nt, synthetic construct
  variation 1..14: note = Description of Sequence: ASO sequence
  misc_feature 1..14: note = Note: the sequence may be DNA or RNA
  source 1..14: mol_type = other RNA
ccatccaccttcat

SEQ ID NO: 476 - RNA, 14 nt, synthetic construct
  variation 1..14: note = Description of Sequence: ASO sequence
  misc_feature 1..14: note = Note: the sequence may be DNA or RNA
  source 1..14: mol_type = other RNA
gccatccaccttca

SEQ ID NO: 477 - RNA, 14 nt, synthetic construct
  variation 1..14: note = Description of Sequence: ASO sequence
  misc_feature 1..14: note = Note: the sequence may be DNA or RNA
  source 1..14: mol_type = other RNA
cgccatccaccttc

SEQ ID NO: 478 - RNA, 14 nt, synthetic construct
  variation 1..14: note = Description of Sequence: ASO sequence
  misc_feature 1..14: note = Note: the sequence may be DNA or RNA
  source 1..14: mol_type = other RNA
acgccatccacctt

SEQ ID NO: 479 - RNA, 14 nt, synthetic construct
  variation 1..14: note = Description of Sequence: ASO sequence
  misc_feature 1..14: note = Note: the sequence may be DNA or RNA
  source 1..14: mol_type = other RNA
cacgccatccacct

SEQ ID NO: 480 - RNA, 14 nt, synthetic construct
  variation 1..14: note = Description of Sequence: ASO sequence
  misc_feature 1..14: note = Note: the sequence may be DNA or RNA
  source 1..14: mol_type = other RNA
ccacgccatccacc

SEQ ID NO: 481 - RNA, 14 nt, synthetic construct
  variation 1..14: note = Description of Sequence: ASO sequence
  misc_feature 1..14: note = Note: the sequence may be DNA or RNA
  source 1..14: mol_type = other RNA
accacgccatccac

SEQ ID NO: 482 - RNA, 14 nt, synthetic construct
  variation 1..14: note = Description of Sequence: ASO sequence
  misc_feature 1..14: note = Note: the sequence may be DNA or RNA
  source 1..14: mol_type = other RNA
gaccacgccatcca

SEQ ID NO: 483 - RNA, 14 nt, synthetic construct
  variation 1..14: note = Description of Sequence: ASO sequence
  misc_feature 1..14: note = Note: the sequence may be DNA or RNA
  source 1..14: mol_type = other RNA
tgaccacgccatcc

SEQ ID NO: 484 - RNA, 14 nt, synthetic construct
  variation 1..14: note = Description of Sequence: ASO sequence
  misc_feature 1..14: note = Note: the sequence may be DNA or RNA
  source 1..14: mol_type = other RNA
atgaccacgccatc

SEQ ID NO: 485 - RNA, 14 nt, synthetic construct
  variation 1..14: note = Description of Sequence: ASO sequence
  misc_feature 1..14: note = Note: the sequence may be DNA or RNA
  source 1..14: mol_type = other RNA
gatgaccacgccat

SEQ ID NO: 486 - RNA, 14 nt, synthetic construct
  variation 1..14: note = Description of Sequence: ASO sequence
  misc_feature 1..14: note = Note: the sequence may be DNA or RNA
  source 1..14: mol_type = other RNA
ggatgaccacgcca

SEQ ID NO: 487 - RNA, 14 nt, synthetic construct
  variation 1..14: note = Description of Sequence: ASO sequence
  misc_feature 1..14: note = Note: the sequence may be DNA or RNA
  source 1..14: mol_type = other RNA
tggatgaccacgcc

SEQ ID NO: 488 - RNA, 14 nt, synthetic construct
  variation 1..14: note = Description of Sequence: ASO sequence
  misc_feature 1..14: note = Note: the sequence may be DNA or RNA
  source 1..14: mol_type = other RNA
ctggatgaccacgc

SEQ ID NO: 489 - RNA, 14 nt, synthetic construct
  variation 1..14: note = Description of Sequence: ASO sequence
  misc_feature 1..14: note = Note: the sequence may be DNA or RNA
  source 1..14: mol_type = other RNA
gctggatgaccacg

SEQ ID NO: 490 - RNA, 14 nt, synthetic construct
  variation 1..14: note = Description of Sequence: ASO sequence
  misc_feature 1..14: note = Note: the sequence may be DNA or RNA
  source 1..14: mol_type = other RNA
agctggatgaccac

SEQ ID NO: 491 - RNA, 14 nt, synthetic construct
  variation 1..14: note = Description of Sequence: ASO sequence
  misc_feature 1..14: note = Note: the sequence may be DNA or RNA
  source 1..14: mol_type = other RNA
cagctggatgacca

SEQ ID NO: 492 - RNA, 14 nt, synthetic construct
  variation 1..14: note = Description of Sequence: ASO sequence
  misc_feature 1..14: note = Note: the sequence may be DNA or RNA
  source 1..14: mol_type = other RNA
tcagctggatgacc

SEQ ID NO: 493 - RNA, 14 nt, synthetic construct
  variation 1..14: note = Description of Sequence: ASO sequence
  misc_feature 1..14: note = Note: the sequence may be DNA or RNA
  source 1..14: mol_type = other RNA
gtcagctggatgac

SEQ ID NO: 494 - RNA, 14 nt, synthetic construct
  variation 1..14: note = Description of Sequence: ASO sequence
  misc_feature 1..14: note = Note: the sequence may be DNA or RNA
  source 1..14: mol_type = other RNA
ggtcagctggatga

SEQ ID NO: 495 - RNA, 14 nt, synthetic construct
  variation 1..14: note = Description of Sequence: ASO sequence
  misc_feature 1..14: note = Note: the sequence may be DNA or RNA
  source 1..14: mol_type = other RNA
tggtcagctggatg

SEQ ID NO: 496 - RNA, 14 nt, synthetic construct
  variation 1..14: note = Description of Sequence: ASO sequence
  misc_feature 1..14: note = Note: the sequence may be DNA or RNA
  source 1..14: mol_type = other RNA
ttggtcagctggat

SEQ ID NO: 497 - RNA, 14 nt, synthetic construct
  variation 1..14: note = Description of Sequence: ASO sequence
  misc_feature 1..14: note = Note: the sequence may be DNA or RNA
  source 1..14: mol_type = other RNA
cttggtcagctgga

SEQ ID NO: 498 - RNA, 14 nt, synthetic construct
  variation 1..14: note = Description of Sequence: ASO sequence
  misc_feature 1..14: note = Note: the sequence may be DNA or RNA
  source 1..14: mol_type = other RNA
ccttggtcagctgg

SEQ ID NO: 499 - RNA, 14 nt, synthetic construct
  variation 1..14: note = Description of Sequence: ASO sequence
  misc_feature 1..14: note = Note: the sequence may be DNA or RNA
  source 1..14: mol_type = other RNA
cccttggtcagctg

SEQ ID NO: 500 - RNA, 14 nt, synthetic construct
  variation 1..14: note = Description of Sequence: ASO sequence
  misc_feature 1..14: note = Note: the sequence may be DNA or RNA
  source 1..14: mol_type = other RNA
gcccttggtcagct

SEQ ID NO: 501 - RNA, 14 nt, synthetic construct
  variation 1..14: note = Description of Sequence: ASO sequence
  misc_feature 1..14: note = Note: the sequence may be DNA or RNA
  source 1..14: mol_type = other RNA
agcccttggtcagc

SEQ ID NO: 502 - RNA, 14 nt, synthetic construct
  variation 1..14: note = Description of Sequence: ASO sequence
  misc_feature 1..14: note = Note: the sequence may be DNA or RNA
  source 1..14: mol_type = other RNA
gagcccttggtcag

SEQ ID NO: 503 - RNA, 14 nt, synthetic construct
  variation 1..14: note = Description of Sequence: ASO sequence
  misc_feature 1..14: note = Note: the sequence may be DNA or RNA
  source 1..14: mol_type = other RNA
ggagcccttggtca

SEQ ID NO: 504 - RNA, 14 nt, synthetic construct
  variation 1..14: note = Description of Sequence: ASO sequence
  misc_feature 1..14: note = Note: the sequence may be DNA or RNA
  source 1..14: mol_type = other RNA
cggagcccttggtc

SEQ ID NO: 505 - RNA, 14 nt, synthetic construct
  variation 1..14: note = Description of Sequence: ASO sequence
  misc_feature 1..14: note = Note: the sequence may be DNA or RNA
  source 1..14: mol_type = other RNA
acggagcccttggt

SEQ ID NO: 506 - RNA, 14 nt, synthetic construct
  variation 1..14: note = Description of Sequence: ASO sequence
  misc_feature 1..14: note = Note: the sequence may be DNA or RNA
  source 1..14: mol_type = other RNA
gacggagcccttgg

SEQ ID NO: 507 - RNA, 14 nt, synthetic construct
  variation 1..14: note = Description of Sequence: ASO sequence
  misc_feature 1..14: note = Note: the sequence may be DNA or RNA
  source 1..14: mol_type = other RNA
ggacggagcccttg

SEQ ID NO: 508 - RNA, 14 nt, synthetic construct
  variation 1..14: note = Description of Sequence: ASO sequence
  misc_feature 1..14: note = Note: the sequence may be DNA or RNA
  source 1..14: mol_type = other RNA
aggacggagccctt

SEQ ID NO: 509 - RNA, 14 nt, synthetic construct
  variation 1..14: note = Description of Sequence: ASO sequence
  misc_feature 1..14: note = Note: the sequence may be DNA or RNA
  source 1..14: mol_type = other RNA
caggacggagccct

SEQ ID NO: 510 - RNA, 14 nt, synthetic construct
  variation 1..14: note = Description of Sequence: ASO sequence
  misc_feature 1..14: note = Note: the sequence may be DNA or RNA
  source 1..14: mol_type = other RNA
ccaggacggagccc

SEQ ID NO: 511 - RNA, 14 nt, synthetic construct
  variation 1..14: note = Description of Sequence: ASO sequence
  misc_feature 1..14: note = Note: the sequence may be DNA or RNA
  source 1..14: mol_type = other RNA
accaggacggagcc

SEQ ID NO: 512 - RNA, 14 nt, synthetic construct
  variation 1..14: note = Description of Sequence: ASO sequence
  misc_feature 1..14: note = Note: the sequence may be DNA or RNA
  source 1..14: mol_type = other RNA
gaccaggacggagc

SEQ ID NO: 513 - RNA, 14 nt, synthetic construct
  variation 1..14: note = Description of Sequence: ASO sequence
  misc_feature 1..14: note = Note: the sequence may be DNA or RNA
  source 1..14: mol_type = other RNA
tgaccaggacggag

SEQ ID NO: 514 - RNA, 14 nt, synthetic construct
  variation 1..14: note = Description of Sequence: ASO sequence
  misc_feature 1..14: note = Note: the sequence may be DNA or RNA
  source 1..14: mol_type = other RNA
ttgaccaggacgga

SEQ ID NO: 515 - RNA, 14 nt, synthetic construct
  variation 1..14: note = Description of Sequence: ASO sequence
  misc_feature 1..14: note = Note: the sequence may be DNA or RNA
  source 1..14: mol_type = other RNA
gttgaccaggacgg

SEQ ID NO: 516 - RNA, 14 nt, synthetic construct
  variation 1..14: note = Description of Sequence: ASO sequence
  misc_feature 1..14: note = Note: the sequence may be DNA or RNA
  source 1..14: mol_type = other RNA
cgttgaccaggacg

SEQ ID NO: 517 - RNA, 14 nt, synthetic construct
  variation 1..14: note = Description of Sequence: ASO sequence
  misc_feature 1..14: note = Note: the sequence may be DNA or RNA
  source 1..14: mol_type = other RNA
ccgttgaccaggac

SEQ ID NO: 518 - RNA, 14 nt, synthetic construct
  variation 1..14: note = Description of Sequence: ASO sequence
  misc_feature 1..14: note = Note: the sequence may be DNA or RNA
  source 1..14: mol_type = other RNA
gccgttgaccagga

SEQ ID NO: 519 - RNA, 14 nt, synthetic construct
  variation 1..14: note = Description of Sequence: ASO sequence
  misc_feature 1..14: note = Note: the sequence may be DNA or RNA
  source 1..14: mol_type = other RNA
ggccgttgaccagg

SEQ ID NO: 520 - RNA, 14 nt, synthetic construct
  variation 1..14: note = Description of Sequence: ASO sequence
  misc_feature 1..14: note = Note: the sequence may be DNA or RNA
  source 1..14: mol_type = other RNA
tggccgttgaccag

SEQ ID NO: 521 - RNA, 14 nt, synthetic construct
  variation 1..14: note = Description of Sequence: ASO sequence
  misc_feature 1..14: note = Note: the sequence may be DNA or RNA
  source 1..14: mol_type = other RNA
gtggccgttgacca

SEQ ID NO: 522 - RNA, 14 nt, synthetic construct
  variation 1..14: note = Description of Sequence: ASO sequence
  misc_feature 1..14: note = Note: the sequence may be DNA or RNA
  source 1..14: mol_type = other RNA
ggtggccgttgacc

SEQ ID NO: 523 - RNA, 14 nt, synthetic construct
  variation 1..14: note = Description of Sequence: ASO sequence
  misc_feature 1..14: note = Note: the sequence may be DNA or RNA
  source 1..14: mol_type = other RNA
gggtggccgttgac

SEQ ID NO: 524 - RNA, 14 nt, synthetic construct
  variation 1..14: note = Description of Sequence: ASO sequence
  misc_feature 1..14: note = Note: the sequence may be DNA or RNA
  source 1..14: mol_type = other RNA
agggcagcaggacc

SEQ ID NO: 525 - RNA, 14 nt, synthetic construct
  variation 1..14: note = Description of Sequence: ASO sequence
  misc_feature 1..14: note = Note: the sequence may be DNA or RNA
  source 1..14: mol_type = other RNA
aagggcagcaggac

SEQ ID NO: 526 - RNA, 14 nt, synthetic construct
  variation 1..14: note = Description of Sequence: ASO sequence
  misc_feature 1..14: note = Note: the sequence may be DNA or RNA
  source 1..14: mol_type = other RNA
gaagggcagcagga

SEQ ID NO: 527 - RNA, 14 nt, synthetic construct
  variation 1..14: note = Description of Sequence: ASO sequence
  misc_feature 1..14: note = Note: the sequence may be DNA or RNA
  source 1..14: mol_type = other RNA
tgaagggcagcagg

SEQ ID NO: 528 - RNA, 14 nt, synthetic construct
  variation 1..14: note = Description of Sequence: ASO sequence
  misc_feature 1..14: note = Note: the sequence may be DNA or RNA
  source 1..14: mol_type = other RNA
ctgaagggcagcag

SEQ ID NO: 529 - RNA, 14 nt, synthetic construct
  variation 1..14: note = Description of Sequence: ASO sequence
  misc_feature 1..14: note = Note: the sequence may be DNA or RNA
  source 1..14: mol_type = other RNA
gctgaagggcagca

SEQ ID NO: 530 - RNA, 14 nt, synthetic construct
  variation 1..14: note = Description of Sequence: ASO sequence
  misc_feature 1..14: note = Note: the sequence may be DNA or RNA
  source 1..14: mol_type = other RNA
ggctgaagggcagc

SEQ ID NO: 531 - RNA, 14 nt, synthetic construct
  variation 1..14: note = Description of Sequence: ASO sequence
  misc_feature 1..14: note = Note: the sequence may be DNA or RNA
  source 1..14: mol_type = other RNA
tggctgaagggcag

SEQ ID NO: 532 - RNA, 14 nt, synthetic construct
  variation 1..14: note = Description of Sequence: ASO sequence
  misc_feature 1..14: note = Note: the sequence may be DNA or RNA
  source 1..14: mol_type = other RNA
ctggctgaagggca

SEQ ID NO: 533 - RNA, 14 nt, synthetic construct
  variation 1..14: note = Description of Sequence: ASO sequence
  misc_feature 1..14: note = Note: the sequence may be DNA or RNA
  source 1..14: mol_type = other RNA
actggctgaagggc

SEQ ID NO: 534 - RNA, 14 nt, synthetic construct
  variation 1..14: note = Description of Sequence: ASO sequence
  misc_feature 1..14: note = Note: the sequence may be DNA or RNA
  source 1..14: mol_type = other RNA
gactggctgaaggg

SEQ ID NO: 535 - RNA, 14 nt, synthetic construct
  variation 1..14: note = Description of Sequence: ASO sequence
  misc_feature 1..14: note = Note: the sequence may be DNA or RNA
  source 1..14: mol_type = other RNA
agactggctgaagg

SEQ ID NO: 536 - RNA, 14 nt, synthetic construct
  variation 1..14: note = Description of Sequence: ASO sequence
  misc_feature 1..14: note = Note: the sequence may be DNA or RNA
  source 1..14: mol_type = other RNA
cagactggctgaag

SEQ ID NO: 537 - RNA, 14 nt, synthetic construct
  variation 1..14: note = Description of Sequence: ASO sequence
  misc_feature 1..14: note = Note: the sequence may be DNA or RNA
  source 1..14: mol_type = other RNA
ccagactggctgaa

SEQ ID NO: 538 - RNA, 14 nt, synthetic construct
  variation 1..14: note = Description of Sequence: ASO sequence
  misc_feature 1..14: note = Note: the sequence may be DNA or RNA
  source 1..14: mol_type = other RNA
cccagactggctga

SEQ ID NO: 539 - RNA, 14 nt, synthetic construct
  variation 1..14: note = Description of Sequence: ASO sequence
  misc_feature 1..14: note = Note: the sequence may be DNA or RNA
  source 1..14: mol_type = other RNA
ccccagactggctg

SEQ ID NO: 540 - RNA, 14 nt, synthetic construct
  variation 1..14: note = Description of Sequence: ASO sequence
  misc_feature 1..14: note = Note: the sequence may be DNA or RNA
  source 1..14: mol_type = other RNA
accccagactggct

SEQ ID NO: 541 - RNA, 14 nt, synthetic construct
  variation 1..14: note = Description of Sequence: ASO sequence
  misc_feature 1..14: note = Note: the sequence may be DNA or RNA
  source 1..14: mol_type = other RNA
gaccccagactggc

SEQ ID NO: 542 - RNA, 14 nt, synthetic construct
  variation 1..14: note = Description of Sequence: ASO sequence
  misc_feature 1..14: note = Note: the sequence may be DNA or RNA
  source 1..14: mol_type = other RNA
ggaccccagactgg

SEQ ID NO: 543 - RNA, 14 nt, synthetic construct
  variation 1..14: note = Description of Sequence: ASO sequence
  misc_feature 1..14: note = Note: the sequence may be DNA or RNA
  source 1..14: mol_type = other RNA
aggaccccagactg

SEQ ID NO: 544 - RNA, 14 nt, synthetic construct
  variation 1..14: note = Description of Sequence: ASO sequence
  misc_feature 1..14: note = Note: the sequence may be DNA or RNA
  source 1..14: mol_type = other RNA
gaggaccccagact

SEQ ID NO: 545 - RNA, 14 nt, synthetic construct
  variation 1..14: note = Description of Sequence: ASO sequence
  misc_feature 1..14: note = Note: the sequence may be DNA or RNA
  source 1..14: mol_type = other RNA
tgaggaccccagac

SEQ ID NO: 546 - RNA, 14 nt, synthetic construct
  variation 1..14: note = Description of Sequence: ASO sequence
  misc_feature 1..14: note = Note: the sequence may be DNA or RNA
  source 1..14: mol_type = other RNA
atgaggaccccaga

SEQ ID NO: 547 - RNA, 14 nt, synthetic construct
  variation 1..14: note = Description of Sequence: ASO sequence
  misc_feature 1..14: note = Note: the sequence may be DNA or RNA
  source 1..14: mol_type = other RNA
aatgaggaccccag

SEQ ID NO: 548 - RNA, 14 nt, synthetic construct
  variation 1..14: note = Description of Sequence: ASO sequence
  misc_feature 1..14: note = Note: the sequence may be DNA or RNA
  source 1..14: mol_type = other RNA
gaatgaggacccca

SEQ ID NO: 549 - RNA, 14 nt, synthetic construct
  variation 1..14: note = Description of Sequence: ASO sequence
  misc_feature 1..14: note = Note: the sequence may be DNA or RNA
  source 1..14: mol_type = other RNA
tgaatgaggacccc

SEQ ID NO: 550 - RNA, 14 nt, synthetic construct
  variation 1..14: note = Description of Sequence: ASO sequence
  misc_feature 1..14: note = Note: the sequence may be DNA or RNA
  source 1..14: mol_type = other RNA
ctgaatgaggaccc

SEQ ID NO: 551 - RNA, 14 nt, synthetic construct
  variation 1..14: note = Description of Sequence: ASO sequence
  misc_feature 1..14: note = Note: the sequence may be DNA or RNA
  source 1..14: mol_type = other RNA
gctgaatgaggacc

SEQ ID NO: 552 - RNA, 14 nt, synthetic construct
  variation 1..14: note = Description of Sequence: ASO sequence
  misc_feature 1..14: note = Note: the sequence may be DNA or RNA
  source 1..14: mol_type = other RNA
tgctgaatgaggac

SEQ ID NO: 553 - RNA, 14 nt, synthetic construct
  variation 1..14: note = Description of Sequence: ASO sequence
  misc_feature 1..14: note = Note: the sequence may be DNA or RNA
  source 1..14: mol_type = other RNA
ctgctgaatgagga

SEQ ID NO: 554 - RNA, 14 nt, synthetic construct
  variation 1..14: note = Description of Sequence: ASO sequence
  misc_feature 1..14: note = Note: the sequence may be DNA or RNA
  source 1..14: mol_type = other RNA
tctgctgaatgagg

SEQ ID NO: 555 - RNA, 14 nt, synthetic construct
  variation 1..14: note = Description of Sequence: ASO sequence
  misc_feature 1..14: note = Note: the sequence may be DNA or RNA
  source 1..14: mol_type = other RNA
ctctgctgaatgag

SEQ ID NO: 556 - RNA, 14 nt, synthetic construct
  variation 1..14: note = Description of Sequence: ASO sequence
  misc_feature 1..14: note = Note: the sequence may be DNA or RNA
  source 1..14: mol_type = other RNA
gctctgctgaatga

SEQ ID NO: 557 - RNA, 14 nt, synthetic construct
  variation 1..14: note = Description of Sequence: ASO sequence
  misc_feature 1..14: note = Note: the sequence may be DNA or RNA
  source 1..14: mol_type = other RNA
tgctctgctgaatg

SEQ ID NO: 558 - RNA, 14 nt, synthetic construct
  variation 1..14: note = Description of Sequence: ASO sequence
  misc_feature 1..14: note = Note: the sequence may be DNA or RNA
  source 1..14: mol_type = other RNA
ctgctctgctgaat

SEQ ID NO: 559 - RNA, 14 nt, synthetic construct
  variation 1..14: note = Description of Sequence: ASO sequence
  misc_feature 1..14: note = Note: the sequence may be DNA or RNA
  source 1..14: mol_type = other RNA
gctgctctgctgaa

SEQ ID NO: 560 - RNA, 14 nt, synthetic construct
  variation 1..14: note = Description of Sequence: ASO sequence
  misc_feature 1..14: note = Note: the sequence may be DNA or RNA
  source 1..14: mol_type = other RNA
tgctgctctgctga

SEQ ID NO: 561 - RNA, 14 nt, synthetic construct
  variation 1..14: note = Description of Sequence: ASO sequence
  misc_feature 1..14: note = Note: the sequence may be DNA or RNA
  source 1..14: mol_type = other RNA
ctgctgctctgctg

SEQ ID NO: 562 - RNA, 14 nt, synthetic construct
  variation 1..14: note = Description of Sequence: ASO sequence
  misc_feature 1..14: note = Note: the sequence may be DNA or RNA
  source 1..14: mol_type = other RNA
gctgctgctctgct

SEQ ID NO: 563 - RNA, 14 nt, synthetic construct
  variation 1..14: note = Description of Sequence: ASO sequence
  misc_feature 1..14: note = Note: the sequence may be DNA or RNA
  source 1..14: mol_type = other RNA
agctgctgctctgc

SEQ ID NO: 564 - RNA, 14 nt, synthetic construct
  variation 1..14: note = Description of Sequence: ASO sequence
  misc_feature 1..14: note = Note: the sequence may be DNA or RNA
  source 1..14: mol_type = other RNA
tagctgctgctctg

SEQ ID NO: 565 - RNA, 14 nt, synthetic construct
  variation 1..14: note = Description of Sequence: ASO sequence
  misc_feature 1..14: note = Note: the sequence may be DNA or RNA
  source 1..14: mol_type = other RNA
gtagctgctgctct

SEQ ID NO: 566 - RNA, 14 nt, synthetic construct
  variation 1..14: note = Description of Sequence: ASO sequence
  misc_feature 1..14: note = Note: the sequence may be DNA or RNA
  source 1..14: mol_type = other RNA
tgtagctgctgctc

SEQ ID NO: 567 - RNA, 14 nt, synthetic construct
  variation 1..14: note = Description of Sequence: ASO sequence
  misc_feature 1..14: note = Note: the sequence may be DNA or RNA
  source 1..14: mol_type = other RNA
gtgtagctgctgct

SEQ ID NO: 568 - RNA, 14 nt, synthetic construct
  variation 1..14: note = Description of Sequence: ASO sequence
  misc_feature 1..14: note = Note: the sequence may be DNA or RNA
  source 1..14: mol_type = other RNA
ggtgtagctgctgc

SEQ ID NO: 569 - RNA, 14 nt, synthetic construct
  variation 1..14: note = Description of Sequence: ASO sequence
  misc_feature 1..14: note = Note: the sequence may be DNA or RNA
  source 1..14: mol_type = other RNA
tggtgtagctgctg

SEQ ID NO: 570 - RNA, 14 nt, synthetic construct
  variation 1..14: note = Description of Sequence: ASO sequence
  misc_feature 1..14: note = Note: the sequence may be DNA or RNA
  source 1..14: mol_type = other RNA
ttggtgtagctgct

SEQ ID NO: 571 - RNA, 14 nt, synthetic construct
  variation 1..14: note = Description of Sequence: ASO sequence
  misc_feature 1..14: note = Note: the sequence may be DNA or RNA
  source 1..14: mol_type = other RNA
cttggtgtagctgc

SEQ ID NO: 572 - RNA, 14 nt, synthetic construct
  variation 1..14: note = Description of Sequence: ASO sequence
  misc_feature 1..14: note = Note: the sequence may be DNA or RNA
  source 1..14: mol_type = other RNA
ccttggtgtagctg

SEQ ID NO: 573 - RNA, 14 nt, synthetic construct
  variation 1..14: note = Description of Sequence: ASO sequence
  misc_feature 1..14: note = Note: the sequence may be DNA or RNA
  source 1..14: mol_type = other RNA
accttggtgtagct

SEQ ID NO: 574 - RNA, 14 nt, synthetic construct
  variation 1..14: note = Description of Sequence: ASO sequence
  misc_feature 1..14: note = Note: the sequence may be DNA or RNA
  source 1..14: mol_type = other RNA
caccttggtgtagc

SEQ ID NO: 575 - RNA, 14 nt, synthetic construct
  variation 1..14: note = Description of Sequence: ASO sequence
  misc_feature 1..14: note = Note: the sequence may be DNA or RNA
  source 1..14: mol_type = other RNA
ccaccttggtgtag

SEQ ID NO: 576 - RNA, 14 nt, synthetic construct
  variation 1..14: note = Description of Sequence: ASO sequence
  misc_feature 1..14: note = Note: the sequence may be DNA or RNA
  source 1..14: mol_type = other RNA
tccaccttggtgta

SEQ ID NO: 577 - RNA, 14 nt, synthetic construct
  variation 1..14: note = Description of Sequence: ASO sequence
  misc_feature 1..14: note = Note: the sequence may be DNA or RNA
  source 1..14: mol_type = other RNA
ctccaccttggtgt

SEQ ID NO: 578 - RNA, 14 nt, synthetic construct
  variation 1..14: note = Description of Sequence: ASO sequence
  misc_feature 1..14: note = Note: the sequence may be DNA or RNA
  source 1..14: mol_type = other RNA
cctccaccttggtg

SEQ ID NO: 579 - RNA, 14 nt, synthetic construct
  variation 1..14: note = Description of Sequence: ASO sequence
  misc_feature 1..14: note = Note: the sequence may be DNA or RNA
  source 1..14: mol_type = other RNA
gcctccaccttggt

SEQ ID NO: 580 - RNA, 14 nt, synthetic construct
  variation 1..14: note = Description of Sequence: ASO sequence
  misc_feature 1..14: note = Note: the sequence may be DNA or RNA
  source 1..14: mol_type = other RNA
ggcctccaccttgg

SEQ ID NO: 581 - RNA, 14 nt, synthetic construct
  variation 1..14: note = Description of Sequence: ASO sequence
  misc_feature 1..14: note = Note: the sequence may be DNA or RNA
  source 1..14: mol_type = other RNA
tggcctccaccttg

SEQ ID NO: 582 - RNA, 14 nt, synthetic construct
  variation 1..14: note = Description of Sequence: ASO sequence
  misc_feature 1..14: note = Note: the sequence may be DNA or RNA
  source 1..14: mol_type = other RNA
ctggcctccacctt

SEQ ID NO: 583 - RNA, 14 nt, synthetic construct
  variation 1..14: note = Description of Sequence: ASO sequence
  misc_feature 1..14: note = Note: the sequence may be DNA or RNA
  source 1..14: mol_type = other RNA
cctggcctccacct

SEQ ID NO: 584 - RNA, 14 nt, synthetic construct
  variation 1..14: note = Description of Sequence: ASO sequence
  misc_feature 1..14: note = Note: the sequence may be DNA or RNA
  source 1..14: mol_type = other RNA
gcctggcctccacc

SEQ ID NO: 585 - RNA, 14 nt, synthetic construct
  variation 1..14: note = Description of Sequence: ASO sequence
  misc_feature 1..14: note = Note: the sequence may be DNA or RNA
  source 1..14: mol_type = other RNA
agcctggcctccac

SEQ ID NO: 586 - RNA, 14 nt, synthetic construct
  variation 1..14: note = Description of Sequence: ASO sequence
  misc_feature 1..14: note = Note: the sequence may be DNA or RNA
  source 1..14: mol_type = other RNA
cagcctggcctcca

SEQ ID NO: 587 - RNA, 14 nt, synthetic construct
  variation 1..14: note = Description of Sequence: ASO sequence
  misc_feature 1..14: note = Note: the sequence may be DNA or RNA
  source 1..14: mol_type = other RNA
ccagcctggcctcc

SEQ ID NO: 588 - RNA, 14 nt, synthetic construct
  variation 1..14: note = Description of Sequence: ASO sequence
  misc_feature 1..14: note = Note: the sequence may be DNA or RNA
  source 1..14: mol_type = other RNA
cccagcctggcctc

SEQ ID NO: 589 - RNA, 14 nt, synthetic construct
  variation 1..14: note = Description of Sequence: ASO sequence
  misc_feature 1..14: note = Note: the sequence may be DNA or RNA
  source 1..14: mol_type = other RNA
gcccagcctggcct

SEQ ID NO: 590 - RNA, 14 nt, synthetic construct
  variation 1..14: note = Description of Sequence: ASO sequence
  misc_feature 1..14: note = Note: the sequence may be DNA or RNA
  source 1..14: mol_type = other RNA
ggcccagcctggcc

SEQ ID NO: 591 - RNA, 14 nt, synthetic construct
  variation 1..14: note = Description of Sequence: ASO sequence
  misc_feature 1..14: note = Note: the sequence may be DNA or RNA
  source 1..14: mol_type = other RNA
aggcccagcctggc

SEQ ID NO: 592 - RNA, 14 nt, synthetic construct
  variation 1..14: note = Description of Sequence: ASO sequence
  misc_feature 1..14: note = Note: the sequence may be DNA or RNA
  source 1..14: mol_type = other RNA
aaggcccagcctgg

SEQ ID NO: 593 - RNA, 14 nt, synthetic construct
  variation 1..14: note = Description of Sequence: ASO sequence
  misc_feature 1..14: note = Note: the sequence may be DNA or RNA
  source 1..14: mol_type = other RNA
caaggcccagcctg

SEQ ID NO: 594 - RNA, 14 nt, synthetic construct
  variation 1..14: note = Description of Sequence: ASO sequence
  misc_feature 1..14: note = Note: the sequence may be DNA or RNA
  source 1..14: mol_type = other RNA
acaaggcccagcct

SEQ ID NO: 595 - RNA, 14 nt, synthetic construct
  variation 1..14: note = Description of Sequence: ASO sequence
  misc_feature 1..14: note = Note: the sequence may be DNA or RNA
  source 1..14: mol_type = other RNA
gacaaggcccagcc

SEQ ID NO: 596 - RNA, 14 nt, synthetic construct
  variation 1..14: note = Description of Sequence: ASO sequence
  misc_feature 1..14: note = Note: the sequence may be DNA or RNA
  source 1..14: mol_type = other RNA
ggacaaggcccagc

SEQ ID NO: 597 - RNA, 14 nt, synthetic construct
  variation 1..14: note = Description of Sequence: ASO sequence
  misc_feature 1..14: note = Note: the sequence may be DNA or RNA
  source 1..14: mol_type = other RNA
aggacaaggcccag

SEQ ID NO: 598 - RNA, 14 nt, synthetic construct
  variation 1..14: note = Description of Sequence: ASO sequence
  misc_feature 1..14: note = Note: the sequence may be DNA or RNA
  source 1..14: mol_type = other RNA
gaggacaaggccca

SEQ ID NO: 599 - RNA, 14 nt, synthetic construct
  variation 1..14: note = Description of Sequence: ASO sequence
  misc_feature 1..14: note = Note: the sequence may be DNA or RNA
  source 1..14: mol_type = other RNA
tgaggacaaggccc

SEQ ID NO: 600 - RNA, 14 nt, synthetic construct
  variation 1..14: note = Description of Sequence: ASO sequence
  misc_feature 1..14: note = Note: the sequence may be DNA or RNA
  source 1..14: mol_type = other RNA
atgaggacaaggcc

SEQ ID NO: 601 - RNA, 14 nt, synthetic construct
  variation 1..14: note = Description of Sequence: ASO sequence
  misc_feature 1..14: note = Note: the sequence may be DNA or RNA
  source 1..14: mol_type = other RNA
catgaggacaaggc

SEQ ID NO: 602 - RNA, 14 nt, synthetic construct
  variation 1..14: note = Description of Sequence: ASO sequence
  misc_feature 1..14: note = Note: the sequence may be DNA or RNA
  source 1..14: mol_type = other RNA
acatgaggacaagg

SEQ ID NO: 603 - RNA, 14 nt, synthetic construct
  variation 1..14: note = Description of Sequence: ASO sequence
  misc_feature 1..14: note = Note: the sequence may be DNA or RNA
  source 1..14: mol_type = other RNA
cacatgaggacaag

SEQ ID NO: 604 - RNA, 14 nt, synthetic construct
  variation 1..14: note = Description of Sequence: ASO sequence
  misc_feature 1..14: note = Note: the sequence may be DNA or RNA
  source 1..14: mol_type = other RNA
ccacatgaggacaa

SEQ ID NO: 605 - RNA, 14 nt, synthetic construct
  variation 1..14: note = Description of Sequence: ASO sequence
  misc_feature 1..14: note = Note: the sequence may be DNA or RNA
  source 1..14: mol_type = other RNA
tccacatgaggaca

SEQ ID NO: 606 - RNA, 14 nt, synthetic construct
  variation 1..14: note = Description of Sequence: ASO sequence
  misc_feature 1..14: note = Note: the sequence may be DNA or RNA
  source 1..14: mol_type = other RNA
ttccacatgaggac

SEQ ID NO: 607 - RNA, 14 nt, synthetic construct
  variation 1..14: note = Description of Sequence: ASO sequence
  misc_feature 1..14: note = Note: the sequence may be DNA or RNA
  source 1..14: mol_type = other RNA
gttccacatgagga

SEQ ID NO: 608 - RNA, 14 nt, synthetic construct
  variation 1..14: note = Description of Sequence: ASO sequence
  misc_feature 1..14: note = Note: the sequence may be DNA or RNA
  source 1..14: mol_type = other RNA
ggttccacatgagg

SEQ ID NO: 609 - RNA, 14 nt, synthetic construct
  variation 1..14: note = Description of Sequence: ASO sequence
  misc_feature 1..14: note = Note: the sequence may be DNA or RNA
  source 1..14: mol_type = other RNA
tggttccacatgag

SEQ ID NO: 610 - RNA, 14 nt, synthetic construct
  variation 1..14: note = Description of Sequence: ASO sequence
  misc_feature 1..14: note = Note: the sequence may be DNA or RNA
  source 1..14: mol_type = other RNA
gtggttccacatga

SEQ ID NO: 611 - RNA, 14 nt, synthetic construct
  variation 1..14: note = Description of Sequence: ASO sequence
  misc_feature 1..14: note = Note: the sequence may be DNA or RNA
  source 1..14: mol_type = other RNA
cgtggttccacatg

SEQ ID NO: 612 - RNA, 14 nt, synthetic construct
  variation 1..14: note = Description of Sequence: ASO sequence
  misc_feature 1..14: note = Note: the sequence may be DNA or RNA
  source 1..14: mol_type = other RNA
tcgtggttccacat

SEQ ID NO: 613 - RNA, 14 nt, synthetic construct
  variation 1..14: note = Description of Sequence: ASO sequence
  misc_feature 1..14: note = Note: the sequence may be DNA or RNA
  source 1..14: mol_type = other RNA
atcgtggttccaca

SEQ ID NO: 614 - RNA, 14 nt, synthetic construct
  variation 1..14: note = Description of Sequence: ASO sequence
  misc_feature 1..14: note = Note: the sequence may be DNA or RNA
  source 1..14: mol_type = other RNA
catcgtggttccac

SEQ ID NO: 615 - RNA, 14 nt, synthetic construct
  variation 1..14: note = Description of Sequence: ASO sequence
  misc_feature 1..14: note = Note: the sequence may be DNA or RNA
  source 1..14: mol_type = other RNA
tcatcgtggttcca

SEQ ID NO: 616 - RNA, 14 nt, synthetic construct
  variation 1..14: note = Description of Sequence: ASO sequence
  misc_feature 1..14: note = Note: the sequence may be DNA or RNA
  source 1..14: mol_type = other RNA
gtcatcgtggttcc

SEQ ID NO: 617 - RNA, 14 nt, synthetic construct
  variation 1..14: note = Description of Sequence: ASO sequence
  misc_feature 1..14: note = Note: the sequence may be DNA or RNA
  source 1..14: mol_type = other RNA
tgtcatcgtggttc

SEQ ID NO: 618 - RNA, 14 nt, synthetic construct
  variation 1..14: note = Description of Sequence: ASO sequence
  misc_feature 1..14: note = Note: the sequence may be DNA or RNA
  source 1..14: mol_type = other RNA
ctgtcatcgtggtt

SEQ ID NO: 619 - RNA, 14 nt, synthetic construct
  variation 1..14: note = Description of Sequence: ASO sequence
  misc_feature 1..14: note = Note: the sequence may be DNA or RNA
  source 1..14: mol_type = other RNA
gctgtcatcgtggt

SEQ ID NO: 620 - RNA, 14 nt, synthetic construct
  variation 1..14: note = Description of Sequence: ASO sequence
  misc_feature 1..14: note = Note: the sequence may be DNA or RNA
  source 1..14: mol_type = other RNA
ggctgtcatcgtgg

SEQ ID NO: 621 - RNA, 14 nt, synthetic construct
  variation 1..14: note = Description of Sequence: ASO sequence
  misc_feature 1..14: note = Note: the sequence may be DNA or RNA
  source 1..14: mol_type = other RNA
aggctgtcatcgtg

SEQ ID NO: 622 - RNA, 14 nt, synthetic construct
  variation 1..14: note = Description of Sequence: ASO sequence
  misc_feature 1..14: note = Note: the sequence may be DNA or RNA
  source 1..14: mol_type = other RNA
caggctgtcatcgt

SEQ ID NO: 623 - RNA, 14 nt, synthetic construct
  variation 1..14: note = Description of Sequence: ASO sequence
  misc_feature 1..14: note = Note: the sequence may be DNA or RNA
  source 1..14: mol_type = other RNA
gcaggctgtcatcg

SEQ ID NO: 624 - RNA, 14 nt, synthetic construct
  variation 1..14: note = Description of Sequence: ASO sequence
  misc_feature 1..14: note = Note: the sequence may be DNA or RNA
  source 1..14: mol_type = other RNA
agcaggctgtcatc

SEQ ID NO: 625 - RNA, 14 nt, synthetic construct
  variation 1..14: note = Description of Sequence: ASO sequence
  misc_feature 1..14: note = Note: the sequence may be DNA or RNA
  source 1..14: mol_type = other RNA
cagcaggctgtcat

SEQ ID NO: 626 - RNA, 14 nt, synthetic construct
  variation 1..14: note = Description of Sequence: ASO sequence
  misc_feature 1..14: note = Note: the sequence may be DNA or RNA
  source 1..14: mol_type = other RNA
gtgtccagctccag

SEQ ID NO: 627 - RNA, 14 nt, synthetic construct
  variation 1..14: note = Description of Sequence: ASO sequence
  misc_feature 1..14: note = Note: the sequence may be DNA or RNA
  source 1..14: mol_type = other RNA
ggtgtccagctcca

SEQ ID NO: 628 - RNA, 14 nt, synthetic construct
  variation 1..14: note = Description of Sequence: ASO sequence
  misc_feature 1..14: note = Note: the sequence may be DNA or RNA
  source 1..14: mol_type = other RNA
tggtgtccagctcc

SEQ ID NO: 629 - RNA, 14 nt, synthetic construct
  variation 1..14: note = Description of Sequence: ASO sequence
  misc_feature 1..14: note = Note: the sequence may be DNA or RNA
  source 1..14: mol_type = other RNA
ttggtgtccagctc

SEQ ID NO: 630 - RNA, 14 nt, synthetic construct
  variation 1..14: note = Description of Sequence: ASO sequence
  misc_feature 1..14: note = Note: the sequence may be DNA or RNA
  source 1..14: mol_type = other RNA
tttggtgtccagct

SEQ ID NO: 631 - RNA, 14 nt, synthetic construct
  variation 1..14: note = Description of Sequence: ASO sequence
  misc_feature 1..14: note = Note: the sequence may be DNA or RNA
  source 1..14: mol_type = other RNA
atttggtgtccagc

SEQ ID NO: 632 - RNA, 14 nt, synthetic construct
  variation 1..14: note = Description of Sequence: ASO sequence
  misc_feature 1..14: note = Note: the sequence may be DNA or RNA
  source 1..14: mol_type = other RNA
tatttggtgtccag

SEQ ID NO: 633 - RNA, 14 nt, synthetic construct
  variation 1..14: note = Description of Sequence: ASO sequence
  misc_feature 1..14: note = Note: the sequence may be DNA or RNA
  source 1..14: mol_type = other RNA
gtatttggtgtcca

SEQ ID NO: 634 - RNA, 14 nt, synthetic construct
  variation 1..14: note = Description of Sequence: ASO sequence
  misc_feature 1..14: note = Note: the sequence may be DNA or RNA
  source 1..14: mol_type = other RNA
cgtatttggtgtcc

SEQ ID NO: 635 - RNA, 14 nt, synthetic construct
  variation 1..14: note = Description of Sequence: ASO sequence
  misc_feature 1..14: note = Note: the sequence may be DNA or RNA
  source 1..14: mol_type = other RNA
gcgtatttggtgtc

SEQ ID NO: 636 - RNA, 14 nt, synthetic construct
  variation 1..14: note = Description of Sequence: ASO sequence
  misc_feature 1..14: note = Note: the sequence may be DNA or RNA
  source 1..14: mol_type = other RNA
ggcgtatttggtgt

SEQ ID NO: 637 - RNA, 14 nt, synthetic construct
  variation 1..14: note = Description of Sequence: ASO sequence
  misc_feature 1..14: note = Note: the sequence may be DNA or RNA
  source 1..14: mol_type = other RNA
tggcgtatttggtg

SEQ ID NO: 638 - RNA, 14 nt, synthetic construct
  variation 1..14: note = Description of Sequence: ASO sequence
  misc_feature 1..14: note = Note: the sequence may be DNA or RNA
  source 1..14: mol_type = other RNA
ttggcgtatttggt

SEQ ID NO: 639 - RNA, 14 nt, synthetic construct
  variation 1..14: note = Description of Sequence: ASO sequence
  misc_feature 1..14: note = Note: the sequence may be DNA or RNA
  source 1..14: mol_type = other RNA
gttggcgtatttgg

SEQ ID NO: 640 - RNA, 14 nt, synthetic construct
  variation 1..14: note = Description of Sequence: ASO sequence
  misc_feature 1..14: note = Note: the sequence may be DNA or RNA
  source 1..14: mol_type = other RNA
tgttggcgtatttg

SEQ ID NO: 641 - RNA, 14 nt, synthetic construct
  variation 1..14: note = Description of Sequence: ASO sequence
  misc_feature 1..14: note = Note: the sequence may be DNA or RNA
  source 1..14: mol_type = other RNA
ttgttggcgtattt

SEQ ID NO: 642 - RNA, 14 nt, synthetic construct
  variation 1..14: note = Description of Sequence: ASO sequence
  misc_feature 1..14: note = Note: the sequence may be DNA or RNA
  source 1..14: mol_type = other RNA
cttgttggcgtatt

SEQ ID NO: 643 - RNA, 14 nt, synthetic construct
  variation 1..14: note = Description of Sequence: ASO sequence
  misc_feature 1..14: note = Note: the sequence may be DNA or RNA
  source 1..14: mol_type = other RNA
tcttgttggcgtat

SEQ ID NO: 644 - RNA, 14 nt, synthetic construct
  variation 1..14: note = Description of Sequence: ASO sequence
  misc_feature 1..14: note = Note: the sequence may be DNA or RNA
  source 1..14: mol_type = other RNA
gtcttgttggcgta

SEQ ID NO: 645 - RNA, 14 nt, synthetic construct
  variation 1..14: note = Description of Sequence: ASO sequence
  misc_feature 1..14: note = Note: the sequence may be DNA or RNA
  source 1..14: mol_type = other RNA
ggtcttgttggcgt

SEQ ID NO: 646 - RNA, 14 nt, synthetic construct
  variation 1..14: note = Description of Sequence: ASO sequence
  misc_feature 1..14: note = Note: the sequence may be DNA or RNA
  source 1..14: mol_type = other RNA
aggtcttgttggcg

SEQ ID NO: 647 - RNA, 14 nt, synthetic construct
  variation 1..14: note = Description of Sequence: ASO sequence
  misc_feature 1..14: note = Note: the sequence may be DNA or RNA
  source 1..14: mol_type = other RNA
caggtcttgttggc

SEQ ID NO: 648 - RNA, 14 nt, synthetic construct
  variation 1..14: note = Description of Sequence: ASO sequence
  misc_feature 1..14: note = Note: the sequence may be DNA or RNA
  source 1..14: mol_type = other RNA
acaggtcttgttgg

SEQ ID NO: 649 - RNA, 14 nt, synthetic construct
  variation 1..14: note = Description of Sequence: ASO sequence
  misc_feature 1..14: note = Note: the sequence may be DNA or RNA
  source 1..14: mol_type = other RNA
cacaggtcttgttg

SEQ ID NO: 650 - RNA, 14 nt, synthetic construct
  variation 1..14: note = Description of Sequence: ASO sequence
  misc_feature 1..14: note = Note: the sequence may be DNA or RNA
  source 1..14: mol_type = other RNA
ccacaggtcttgtt

SEQ ID NO: 651 - RNA, 14 nt, synthetic construct
  variation 1..14: note = Description of Sequence: ASO sequence
  misc_feature 1..14: note = Note: the sequence may be DNA or RNA
  source 1..14: mol_type = other RNA
cccacaggtcttgt

SEQ ID NO: 652 - RNA, 14 nt, synthetic construct
  variation 1..14: note = Description of Sequence: ASO sequence
  misc_feature 1..14: note = Note: the sequence may be DNA or RNA
  source 1..14: mol_type = other RNA
gcccacaggtcttg

SEQ ID NO: 653 - RNA, 14 nt, synthetic construct
  variation 1..14: note = Description of Sequence: ASO sequence
  misc_feature 1..14: note = Note: the sequence may be DNA or RNA
  source 1..14: mol_type = other RNA
agcccacaggtctt

SEQ ID NO: 654 - RNA, 14 nt, synthetic construct
  variation 1..14: note = Description of Sequence: ASO sequence
  misc_feature 1..14: note = Note: the sequence may be DNA or RNA
  source 1..14: mol_type = other RNA
gagcccacaggtct

SEQ ID NO: 655 - RNA, 14 nt, synthetic construct
  variation 1..14: note = Description of Sequence: ASO sequence
  misc_feature 1..14: note = Note: the sequence may be DNA or RNA
  source 1..14: mol_type = other RNA
agagcccacaggtc

SEQ ID NO: 656 - RNA, 14 nt, synthetic construct
  variation 1..14: note = Description of Sequence: ASO sequence
  misc_feature 1..14: note = Note: the sequence may be DNA or RNA
  source 1..14: mol_type = other RNA
cagagcccacaggt

SEQ ID NO: 657 - RNA, 14 nt, synthetic construct
  variation 1..14: note = Description of Sequence: ASO sequence
  misc_feature 1..14: note = Note: the sequence may be DNA or RNA
  source 1..14: mol_type = other RNA
acagagcccacagg

SEQ ID NO: 658 - RNA, 14 nt, synthetic construct
  variation 1..14: note = Description of Sequence: ASO sequence
  misc_feature 1..14: note = Note: the sequence may be DNA or RNA
  source 1..14: mol_type = other RNA
cacagagcccacag

SEQ ID NO: 659 - RNA, 14 nt, synthetic construct
  variation 1..14: note = Description of Sequence: ASO sequence
  misc_feature 1..14: note = Note: the sequence may be DNA or RNA
  source 1..14: mol_type = other RNA
ccacagagcccaca

SEQ ID NO: 660 - RNA, 14 nt, synthetic construct
  variation 1..14: note = Description of Sequence: ASO sequence
  misc_feature 1..14: note = Note: the sequence may be DNA or RNA
  source 1..14: mol_type = other RNA
cccacagagcccac

SEQ ID NO: 661 - RNA, 14 nt, synthetic construct
  variation 1..14: note = Description of Sequence: ASO sequence
  misc_feature 1..14: note = Note: the sequence may be DNA or RNA
  source 1..14: mol_type = other RNA
ccccacagagccca

SEQ ID NO: 662 - RNA, 14 nt, synthetic construct
  variation 1..14: note = Description of Sequence: ASO sequence
  misc_feature 1..14: note = Note: the sequence may be DNA or RNA
  source 1..14: mol_type = other RNA
tccccacagagccc

SEQ ID NO: 663 - RNA, 14 nt, synthetic construct
  variation 1..14: note = Description of Sequence: ASO sequence
  misc_feature 1..14: note = Note: the sequence may be DNA or RNA
  source 1..14: mol_type = other RNA
gtccccacagagcc

SEQ ID NO: 664 - RNA, 14 nt, synthetic construct
  variation 1..14: note = Description of Sequence: ASO sequence
  misc_feature 1..14: note = Note: the sequence may be DNA or RNA
  source 1..14: mol_type = other RNA
agtccccacagagc

SEQ ID NO: 665 - RNA, 14 nt, synthetic construct
  variation 1..14: note = Description of Sequence: ASO sequence
  misc_feature 1..14: note = Note: the sequence may be DNA or RNA
  source 1..14: mol_type = other RNA
aagtccccacagag

SEQ ID NO: 666 - RNA, 14 nt, synthetic construct
  variation 1..14: note = Description of Sequence: ASO sequence
  misc_feature 1..14: note = Note: the sequence may be DNA or RNA
  source 1..14: mol_type = other RNA
gaagtccccacaga

SEQ ID NO: 667 - RNA, 14 nt, synthetic construct
  variation 1..14: note = Description of Sequence: ASO sequence
  misc_feature 1..14: note = Note: the sequence may be DNA or RNA
  source 1..14: mol_type = other RNA
tgaagtccccacag

SEQ ID NO: 668 - RNA, 14 nt, synthetic construct
  variation 1..14: note = Description of Sequence: ASO sequence
  misc_feature 1..14: note = Note: the sequence may be DNA or RNA
  source 1..14: mol_type = other RNA
ttgaagtccccaca

SEQ ID NO: 669 - RNA, 14 nt, synthetic construct
  variation 1..14: note = Description of Sequence: ASO sequence
  misc_feature 1..14: note = Note: the sequence may be DNA or RNA
  source 1..14: mol_type = other RNA
gttgaagtccccac

SEQ ID NO: 670 - RNA, 14 nt, synthetic construct
  variation 1..14: note = Description of Sequence: ASO sequence
  misc_feature 1..14: note = Note: the sequence may be DNA or RNA
  source 1..14: mol_type = other RNA
cgttgaagtcccca

SEQ ID NO: 671 - RNA, 14 nt, synthetic construct
  variation 1..14: note = Description of Sequence: ASO sequence
  misc_feature 1..14: note = Note: the sequence may be DNA or RNA
  source 1..14: mol_type = other RNA
ccgttgaagtcccc

SEQ ID NO: 672 - RNA, 14 nt, synthetic construct
  variation 1..14: note = Description of Sequence: ASO sequence
  misc_feature 1..14: note = Note: the sequence may be DNA or RNA
  source 1..14: mol_type = other RNA
cccgttgaagtccc

SEQ ID NO: 673 - RNA, 14 nt, synthetic construct
  variation 1..14: note = Description of Sequence: ASO sequence
  misc_feature 1..14: note = Note: the sequence may be DNA or RNA
  source 1..14: mol_type = other RNA
tcccgttgaagtcc

SEQ ID NO: 674 - RNA, 14 nt, synthetic construct
  variation 1..14: note = Description of Sequence: ASO sequence
  misc_feature 1..14: note = Note: the sequence may be DNA or RNA
  source 1..14: mol_type = other RNA
atcccgttgaagtc

SEQ ID NO: 675 - RNA, 14 nt, synthetic construct
  variation 1..14: note = Description of Sequence: ASO sequence
  misc_feature 1..14: note = Note: the sequence may be DNA or RNA
  source 1..14: mol_type = other RNA
catcccgttgaagt

SEQ ID NO: 676 - RNA, 14 nt, synthetic construct
  variation 1..14: note = Description of Sequence: ASO sequence
  misc_feature 1..14: note = Note: the sequence may be DNA or RNA
  source 1..14: mol_type = other RNA
gcatcccgttgaag

SEQ ID NO: 677 - RNA, 14 nt, synthetic construct
  variation 1..14: note = Description of Sequence: ASO sequence
  misc_feature 1..14: note = Note: the sequence may be DNA or RNA
  source 1..14: mol_type = other RNA
ggcatcccgttgaa

SEQ ID NO: 678 - RNA, 14 nt, synthetic construct
  variation 1..14: note = Description of Sequence: ASO sequence
  misc_feature 1..14: note = Note: the sequence may be DNA or RNA
  source 1..14: mol_type = other RNA
gggcatcccgttga

SEQ ID NO: 679 - RNA, 14 nt, synthetic construct
  variation 1..14: note = Description of Sequence: ASO sequence
  misc_feature 1..14: note = Note: the sequence may be DNA or RNA
  source 1..14: mol_type = other RNA
cgggcatcccgttg

SEQ ID NO: 680 - RNA, 14 nt, synthetic construct
  variation 1..14: note = Description of Sequence: ASO sequence
  misc_feature 1..14: note = Note: the sequence may be DNA or RNA
  source 1..14: mol_type = other RNA
acgggcatcccgtt

SEQ ID NO: 681 - RNA, 14 nt, synthetic construct
  variation 1..14: note = Description of Sequence: ASO sequence
  misc_feature 1..14: note = Note: the sequence may be DNA or RNA
  source 1..14: mol_type = other RNA
cacgggcatcccgt

SEQ ID NO: 682 - RNA, 14 nt, synthetic construct
  variation 1..14: note = Description of Sequence: ASO sequence
  misc_feature 1..14: note = Note: the sequence may be DNA or RNA
  source 1..14: mol_type = other RNA
ccacgggcatcccg

SEQ ID NO: 683 - RNA, 14 nt, synthetic construct
  variation 1..14: note = Description of Sequence: ASO sequence
  misc_feature 1..14: note = Note: the sequence may be DNA or RNA
  source 1..14: mol_type = other RNA
accacgggcatccc

SEQ ID NO: 684 - RNA, 14 nt, synthetic construct
  variation 1..14: note = Description of Sequence: ASO sequence
  misc_feature 1..14: note = Note: the sequence may be DNA or RNA
  source 1..14: mol_type = other RNA
gaccacgggcatcc

SEQ ID NO: 685 - RNA, 14 nt, synthetic construct
  variation 1..14: note = Description of Sequence: ASO sequence
  misc_feature 1..14: note = Note: the sequence may be DNA or RNA
  source 1..14: mol_type = other RNA
tgaccacgggcatc

SEQ ID NO: 686 - RNA, 14 nt, synthetic construct
  variation 1..14: note = Description of Sequence: ASO sequence
  misc_feature 1..14: note = Note: the sequence may be DNA or RNA
  source 1..14: mol_type = other RNA
ctgaccacgggcat

SEQ ID NO: 687 - RNA, 14 nt, synthetic construct
  variation 1..14: note = Description of Sequence: ASO sequence
  misc_feature 1..14: note = Note: the sequence may be DNA or RNA
  source 1..14: mol_type = other RNA
gctgaccacgggca

SEQ ID NO: 688 - RNA, 14 nt, synthetic construct
  variation 1..14: note = Description of Sequence: ASO sequence
  misc_feature 1..14: note = Note: the sequence may be DNA or RNA
  source 1..14: mol_type = other RNA
cgctgaccacgggc

SEQ ID NO: 689 - RNA, 14 nt, synthetic construct
  variation 1..14: note = Description of Sequence: ASO sequence
  misc_feature 1..14: note = Note: the sequence may be DNA or RNA
  source 1..14: mol_type = other RNA
tcgctgaccacggg

SEQ ID NO: 690 - RNA, 14 nt, synthetic construct
  variation 1..14: note = Description of Sequence: ASO sequence
  misc_feature 1..14: note = Note: the sequence may be DNA or RNA
  source 1..14: mol_type = other RNA
ctcgctgaccacgg

SEQ ID NO: 691 - RNA, 14 nt, synthetic construct
  variation 1..14: note = Description of Sequence: ASO sequence
  misc_feature 1..14: note = Note: the sequence may be DNA or RNA
  source 1..14: mol_type = other RNA
gctcgctgaccacg

SEQ ID NO: 692 - RNA, 14 nt, synthetic construct
  variation 1..14: note = Description of Sequence: ASO sequence
  misc_feature 1..14: note = Note: the sequence may be DNA or RNA
  source 1..14: mol_type = other RNA
agctcgctgaccac

SEQ ID NO: 693 - RNA, 14 nt, synthetic construct
  variation 1..14: note = Description of Sequence: ASO sequence
  misc_feature 1..14: note = Note: the sequence may be DNA or RNA
  source 1..14: mol_type = other RNA
gagctcgctgacca

SEQ ID NO: 694 - RNA, 14 nt, synthetic construct
  variation 1..14: note = Description of Sequence: ASO sequence
  misc_feature 1..14: note = Note: the sequence may be DNA or RNA
  source 1..14: mol_type = other RNA
ggagctcgctgacc

SEQ ID NO: 695 - RNA, 14 nt, synthetic construct
  variation 1..14: note = Description of Sequence: ASO sequence
  misc_feature 1..14: note = Note: the sequence may be DNA or RNA
  source 1..14: mol_type = other RNA
aggagctcgctgac

SEQ ID NO: 696 - RNA, 14 nt, synthetic construct
  variation 1..14: note = Description of Sequence: ASO sequence
  misc_feature 1..14: note = Note: the sequence may be DNA or RNA
  source 1..14: mol_type = other RNA
gaggagctcgctga

SEQ ID NO: 697 - RNA, 14 nt, synthetic construct
  variation 1..14: note = Description of Sequence: ASO sequence
  misc_feature 1..14: note = Note: the sequence may be DNA or RNA
  source 1..14: mol_type = other RNA
agaggagctcgctg

SEQ ID NO: 698 - RNA, 14 nt, synthetic construct
  variation 1..14: note = Description of Sequence: ASO sequence
  misc_feature 1..14: note = Note: the sequence may be DNA or RNA
  source 1..14: mol_type = other RNA
gagaggagctcgct

SEQ ID NO: 699 - RNA, 14 nt, synthetic construct
  variation 1..14: note = Description of Sequence: ASO sequence
  misc_feature 1..14: note = Note: the sequence may be DNA or RNA
  source 1..14: mol_type = other RNA
ggagaggagctcgc

SEQ ID NO: 700 - RNA, 14 nt, synthetic construct
  variation 1..14: note = Description of Sequence: ASO sequence
  misc_feature 1..14: note = Note: the sequence may be DNA or RNA
  source 1..14: mol_type = other RNA
gggagaggagctcg

SEQ ID NO: 701 - RNA, 14 nt, synthetic construct
  variation 1..14: note = Description of Sequence: ASO sequence
  misc_feature 1..14: note = Note: the sequence may be DNA or RNA
  source 1..14: mol_type = other RNA
tgggagaggagctc

SEQ ID NO: 702 - RNA, 14 nt, synthetic construct
  variation 1..14: note = Description of Sequence: ASO sequence
  misc_feature 1..14: note = Note: the sequence may be DNA or RNA
  source 1..14: mol_type = other RNA
gtgggagaggagct

SEQ ID NO: 703 - RNA, 14 nt, synthetic construct
  variation 1..14: note = Description of Sequence: ASO sequence
  misc_feature 1..14: note = Note: the sequence may be DNA or RNA
  source 1..14: mol_type = other RNA
tgtgggagaggagc

SEQ ID NO: 704 - RNA, 14 nt, synthetic construct
  variation 1..14: note = Description of Sequence: ASO sequence
  misc_feature 1..14: note = Note: the sequence may be DNA or RNA
  source 1..14: mol_type = other RNA
tgtcagcttggtgt

SEQ ID NO: 705 - RNA, 14 nt, synthetic construct
  variation 1..14: note = Description of Sequence: ASO sequence
  misc_feature 1..14: note = Note: the sequence may be DNA or RNA
  source 1..14: mol_type = other RNA
gtgtcagcttggtg

SEQ ID NO: 706 - RNA, 14 nt, synthetic construct
  variation 1..14: note = Description of Sequence: ASO sequence
  misc_feature 1..14: note = Note: the sequence may be DNA or RNA
  source 1..14: mol_type = other RNA
ggtgtcagcttggt

SEQ ID NO: 707 - RNA, 14 nt, synthetic construct
  variation 1..14: note = Description of Sequence: ASO sequence
  misc_feature 1..14: note = Note: the sequence may be DNA or RNA
  source 1..14: mol_type = other RNA
gggtgtcagcttgg

SEQ ID NO: 708 - RNA, 14 nt, synthetic construct
  variation 1..14: note = Description of Sequence: ASO sequence
  misc_feature 1..14: note = Note: the sequence may be DNA or RNA
  source 1..14: mol_type = other RNA
tgggtgtcagcttg

SEQ ID NO: 709 - RNA, 14 nt, synthetic construct
  variation 1..14: note = Description of Sequence: ASO sequence
  misc_feature 1..14: note = Note: the sequence may be DNA or RNA
  source 1..14: mol_type = other RNA
atgggtgtcagctt

SEQ ID NO: 710 - RNA, 14 nt, synthetic construct
  variation 1..14: note = Description of Sequence: ASO sequence
  misc_feature 1..14: note = Note: the sequence may be DNA or RNA
  source 1..14: mol_type = other RNA
catgggtgtcagct

SEQ ID NO: 711 - RNA, 14 nt, synthetic construct
  variation 1..14: note = Description of Sequence: ASO sequence
  misc_feature 1..14: note = Note: the sequence may be DNA or RNA
  source 1..14: mol_type = other RNA
ccatgggtgtcagc

SEQ ID NO: 712 - RNA, 14 nt, synthetic construct
  variation 1..14: note = Description of Sequence: ASO sequence
  misc_feature 1..14: note = Note: the sequence may be DNA or RNA
  source 1..14: mol_type = other RNA
tccatgggtgtcag

SEQ ID NO: 713 - RNA, 14 nt, synthetic construct
  variation 1..14: note = Description of Sequence: ASO sequence
  misc_feature 1..14: note = Note: the sequence may be DNA or RNA
  source 1..14: mol_type = other RNA
ttccatgggtgtca

SEQ ID NO: 714 - RNA, 14 nt, synthetic construct
  variation 1..14: note = Description of Sequence: ASO sequence
  misc_feature 1..14: note = Note: the sequence may be DNA or RNA
  source 1..14: mol_type = other RNA
attccatgggtgtc

SEQ ID NO: 715 - RNA, 14 nt, synthetic construct
  variation 1..14: note = Description of Sequence: ASO sequence
  misc_feature 1..14: note = Note: the sequence may be DNA or RNA
  source 1..14: mol_type = other RNA
aattccatgggtgt

SEQ ID NO: 716 - RNA, 14 nt, synthetic construct
  variation 1..14: note = Description of Sequence: ASO sequence
  misc_feature 1..14: note = Note: the sequence may be DNA or RNA
  source 1..14: mol_type = other RNA
gaattccatgggtg

SEQ ID NO: 717 - RNA, 14 nt, synthetic construct
  variation 1..14: note = Description of Sequence: ASO sequence
  misc_feature 1..14: note = Note: the sequence may be DNA or RNA
  source 1..14: mol_type = other RNA
cgaattccatgggt

SEQ ID NO: 718 - RNA, 14 nt, synthetic construct
  variation 1..14: note = Description of Sequence: ASO sequence
  misc_feature 1..14: note = Note: the sequence may be DNA or RNA
  source 1..14: mol_type = other RNA
ccgaattccatggg

SEQ ID NO: 719 - RNA, 14 nt, synthetic construct
  variation 1..14: note = Description of Sequence: ASO sequence
  misc_feature 1..14: note = Note: the sequence may be DNA or RNA
  source 1..14: mol_type = other RNA
cccgaattccatgg

SEQ ID NO: 720 - RNA, 14 nt, synthetic construct
  variation 1..14: note = Description of Sequence: ASO sequence
  misc_feature 1..14: note = Note: the sequence may be DNA or RNA
  source 1..14: mol_type = other RNA
tcccgaattccatg

SEQ ID NO: 721 - RNA, 14 nt, synthetic construct
  variation 1..14: note = Description of Sequence: ASO sequence
  misc_feature 1..14: note = Note: the sequence may be DNA or RNA
  source 1..14: mol_type = other RNA
ttcccgaattccat

SEQ ID NO: 722 - RNA, 14 nt, synthetic construct
  variation 1..14: note = Description of Sequence: ASO sequence
  misc_feature 1..14: note = Note: the sequence may be DNA or RNA
  source 1..14: mol_type = other RNA
gttcccgaattcca

SEQ ID NO: 723 - RNA, 14 nt, synthetic construct
  variation 1..14: note = Description of Sequence: ASO sequence
  misc_feature 1..14: note = Note: the sequence may be DNA or RNA
  source 1..14: mol_type = other RNA
ggttcccgaattcc

SEQ ID NO: 724 - RNA, 14 nt, synthetic construct
  variation 1..14: note = Description of Sequence: ASO sequence
  misc_feature 1..14: note = Note: the sequence may be DNA or RNA
  source 1..14: mol_type = other RNA
aggttcccgaattc

SEQ ID NO: 725 - RNA, 14 nt, synthetic construct
  variation 1..14: note = Description of Sequence: ASO sequence
  misc_feature 1..14: note = Note: the sequence may be DNA or RNA
  source 1..14: mol_type = other RNA
caggttcccgaatt

SEQ ID NO: 726 - RNA, 14 nt, synthetic construct
  variation 1..14: note = Description of Sequence: ASO sequence
  misc_feature 1..14: note = Note: the sequence may be DNA or RNA
  source 1..14: mol_type = other RNA
gcaggttcccgaat

SEQ ID NO: 727 - RNA, 14 nt, synthetic construct
  variation 1..14: note = Description of Sequence: ASO sequence
  misc_feature 1..14: note = Note: the sequence may be DNA or RNA
  source 1..14: mol_type = other RNA
tgcaggttcccgaa

SEQ ID NO: 728 - RNA, 14 nt, synthetic construct
  variation 1..14: note = Description of Sequence: ASO sequence
  misc_feature 1..14: note = Note: the sequence may be DNA or RNA
  source 1..14: mol_type = other RNA
ctgcaggttcccga

SEQ ID NO: 729 - RNA, 14 nt, synthetic construct
  variation 1..14: note = Description of Sequence: ASO sequence
  misc_feature 1..14: note = Note: the sequence may be DNA or RNA
  source 1..14: mol_type = other RNA
tctgcaggttcccg

SEQ ID NO: 730 - RNA, 14 nt, synthetic construct
  variation 1..14: note = Description of Sequence: ASO sequence
  misc_feature 1..14: note = Note: the sequence may be DNA or RNA
  source 1..14: mol_type = other RNA
ttctgcaggttccc

SEQ ID NO: 731 - RNA, 14 nt, synthetic construct
  variation 1..14: note = Description of Sequence: ASO sequence
  misc_feature 1..14: note = Note: the sequence may be DNA or RNA
  source 1..14: mol_type = other RNA
cttctgcaggttcc

SEQ ID NO: 732 - RNA, 14 nt, synthetic construct
  variation 1..14: note = Description of Sequence: ASO sequence
  misc_feature 1..14: note = Note: the sequence may be DNA or RNA
  source 1..14: mol_type = other RNA
tcttctgcaggttc

SEQ ID NO: 733 - RNA, 14 nt, synthetic construct
  variation 1..14: note = Description of Sequence: ASO sequence
  misc_feature 1..14: note = Note: the sequence may be DNA or RNA
  source 1..14: mol_type = other RNA
atcttctgcaggtt

SEQ ID NO: 734 - RNA, 14 nt, synthetic construct
  variation 1..14: note = Description of Sequence: ASO sequence
  misc_feature 1..14: note = Note: the sequence may be DNA or RNA
  source 1..14: mol_type = other RNA
catcttctgcaggt

SEQ ID NO: 735 - RNA, 14 nt, synthetic construct
  variation 1..14: note = Description of Sequence: ASO sequence
  misc_feature 1..14: note = Note: the sequence may be DNA or RNA
  source 1..14: mol_type = other RNA
ccatcttctgcagg

SEQ ID NO: 736 - RNA, 14 nt, synthetic construct
  variation 1..14: note = Description of Sequence: ASO sequence
  misc_feature 1..14: note = Note: the sequence may be DNA or RNA
  source 1..14: mol_type = other RNA
tccatcttctgcag

SEQ ID NO: 737 - RNA, 14 nt, synthetic construct
  variation 1..14: note = Description of Sequence: ASO sequence
  misc_feature 1..14: note = Note: the sequence may be DNA or RNA
  source 1..14: mol_type = other RNA
gtccatcttctgca

SEQ ID NO: 738 - RNA, 14 nt, synthetic construct
  variation 1..14: note = Description of Sequence: ASO sequence
  misc_feature 1..14: note = Note: the sequence may be DNA or RNA
  source 1..14: mol_type = other RNA
cgtccatcttctgc

SEQ ID NO: 739 - RNA, 14 nt, synthetic construct
  variation 1..14: note = Description of Sequence: ASO sequence
  misc_feature 1..14: note = Note: the sequence may be DNA or RNA
  source 1..14: mol_type = other RNA
tcgtccatcttctg

SEQ ID NO: 740 - RNA, 14 nt, synthetic construct
  variation 1..14: note = Description of Sequence: ASO sequence
  misc_feature 1..14: note = Note: the sequence may be DNA or RNA
  source 1..14: mol_type = other RNA
gtcgtccatcttct

SEQ ID NO: 741 - RNA, 14 nt, synthetic construct
  variation 1..14: note = Description of Sequence: ASO sequence
  misc_feature 1..14: note = Note: the sequence may be DNA or RNA
  source 1..14: mol_type = other RNA
ggtcgtccatcttc

SEQ ID NO: 742 - RNA, 14 nt, synthetic construct
  variation 1..14: note = Description of Sequence: ASO sequence
  misc_feature 1..14: note = Note: the sequence may be DNA or RNA
  source 1..14: mol_type = other RNA
gggtcgtccatctt

SEQ ID NO: 743 - RNA, 14 nt, synthetic construct
  variation 1..14: note = Description of Sequence: ASO sequence
  misc_feature 1..14: note = Note: the sequence may be DNA or RNA
  source 1..14: mol_type = other RNA
ggggtcgtccatct

SEQ ID NO: 744 - RNA, 14 nt, synthetic construct
  variation 1..14: note = Description of Sequence: ASO sequence
  misc_feature 1..14: note = Note: the sequence may be DNA or RNA
  source 1..14: mol_type = other RNA
tggggtcgtccatc

SEQ ID NO: 745 - RNA, 14 nt, synthetic construct
  variation 1..14: note = Description of Sequence: ASO sequence
  misc_feature 1..14: note = Note: the sequence may be DNA or RNA
  source 1..14: mol_type = other RNA
gtggggtcgtccat

SEQ ID NO: 746 - RNA, 14 nt, synthetic construct
  variation 1..14: note = Description of Sequence: ASO sequence
  misc_feature 1..14: note = Note: the sequence may be DNA or RNA
  source 1..14: mol_type = other RNA
cgtggggtcgtcca

SEQ ID NO: 747 - RNA, 14 nt, synthetic construct
  variation 1..14: note = Description of Sequence: ASO sequence
  misc_feature 1..14: note = Note: the sequence may be DNA or RNA
  source 1..14: mol_type = other RNA
ccgtggggtcgtcc

SEQ ID NO: 748 - RNA, 14 nt, synthetic construct
  variation 1..14: note = Description of Sequence: ASO sequence
  misc_feature 1..14: note = Note: the sequence may be DNA or RNA
  source 1..14: mol_type = other RNA
tccgtggggtcgtc

SEQ ID NO: 749 - RNA, 14 nt, synthetic construct
  variation 1..14: note = Description of Sequence: ASO sequence
  misc_feature 1..14: note = Note: the sequence may be DNA or RNA
  source 1..14: mol_type = other RNA
gtccgtggggtcgt

SEQ ID NO: 750 - RNA, 14 nt, synthetic construct
  variation 1..14: note = Description of Sequence: ASO sequence
  misc_feature 1..14: note = Note: the sequence may be DNA or RNA
  source 1..14: mol_type = other RNA
ggtccgtggggtcg

SEQ ID NO: 751 - RNA, 14 nt, synthetic construct
  variation 1..14: note = Description of Sequence: ASO sequence
  misc_feature 1..14: note = Note: the sequence may be DNA or RNA
  source 1..14: mol_type = other RNA
tggtccgtggggtc

SEQ ID NO: 752 - RNA, 14 nt, synthetic construct
  variation 1..14: note = Description of Sequence: ASO sequence
  misc_feature 1..14: note = Note: the sequence may be DNA or RNA
  source 1..14: mol_type = other RNA
ctggtccgtggggt

SEQ ID NO: 753 - RNA, 14 nt, synthetic construct
  variation 1..14: note = Description of Sequence: ASO sequence
  misc_feature 1..14: note = Note: the sequence may be DNA or RNA
  source 1..14: mol_type = other RNA
actggtccgtgggg

SEQ ID NO: 754 - RNA, 14 nt, synthetic construct
  variation 1..14: note = Description of Sequence: ASO sequence
  misc_feature 1..14: note = Note: the sequence may be DNA or RNA
  source 1..14: mol_type = other RNA
cactggtccgtggg

SEQ ID NO: 755 - RNA, 14 nt, synthetic construct
  variation 1..14: note = Description of Sequence: ASO sequence
  misc_feature 1..14: note = Note: the sequence may be DNA or RNA
  source 1..14: mol_type = other RNA
acactggtccgtgg

SEQ ID NO: 756 - RNA, 14 nt, synthetic construct
  variation 1..14: note = Description of Sequence: ASO sequence
  misc_feature 1..14: note = Note: the sequence may be DNA or RNA
  source 1..14: mol_type = other RNA
gacactggtccgtg

SEQ ID NO: 757 - RNA, 14 nt, synthetic construct
  variation 1..14: note = Description of Sequence: ASO sequence
  misc_feature 1..14: note = Note: the sequence may be DNA or RNA
  source 1..14: mol_type = other RNA
tgacactggtccgt

SEQ ID NO: 758 - RNA, 14 nt, synthetic construct
  variation 1..14: note = Description of Sequence: ASO sequence
  misc_feature 1..14: note = Note: the sequence may be DNA or RNA
  source 1..14: mol_type = other RNA
ctgacactggtccg

SEQ ID NO: 759 - RNA, 14 nt, synthetic construct
  variation 1..14: note = Description of Sequence: ASO sequence
  misc_feature 1..14: note = Note: the sequence may be DNA or RNA
  source 1..14: mol_type = other RNA
cctgacactggtcc

SEQ ID NO: 760 - RNA, 14 nt, synthetic construct
  variation 1..14: note = Description of Sequence: ASO sequence
  misc_feature 1..14: note = Note: the sequence may be DNA or RNA
  source 1..14: mol_type = other RNA
tcctgacactggtc

SEQ ID NO: 761 - RNA, 14 nt, synthetic construct
  variation 1..14: note = Description of Sequence: ASO sequence
  misc_feature 1..14: note = Note: the sequence may be DNA or RNA
  source 1..14: mol_type = other RNA
gtcctgacactggt

SEQ ID NO: 762 - RNA, 14 nt, synthetic construct
  variation 1..14: note = Description of Sequence: ASO sequence
  misc_feature 1..14: note = Note: the sequence may be DNA or RNA
  source 1..14: mol_type = other RNA
ggtcctgacactgg

SEQ ID NO: 763 - RNA, 14 nt, synthetic construct
  variation 1..14: note = Description of Sequence: ASO sequence
  misc_feature 1..14: note = Note: the sequence may be DNA or RNA
  source 1..14: mol_type = other RNA
gggtcctgacactg

SEQ ID NO: 764 - RNA, 14 nt, synthetic construct
  variation 1..14: note = Description of Sequence: ASO sequence
  misc_feature 1..14: note = Note: the sequence may be DNA or RNA
  source 1..14: mol_type = other RNA
agggtcctgacact

SEQ ID NO: 765 - RNA, 14 nt, synthetic construct
  variation 1..14: note = Description of Sequence: ASO sequence
  misc_feature 1..14: note = Note: the sequence may be DNA or RNA
  source 1..14: mol_type = other RNA
cagggtcctgacac

SEQ ID NO: 766 - RNA, 14 nt, synthetic construct
  variation 1..14: note = Description of Sequence: ASO sequence
  misc_feature 1..14: note = Note: the sequence may be DNA or RNA
  source 1..14: mol_type = other RNA
acagggtcctgaca

SEQ ID NO: 767 - RNA, 14 nt, synthetic construct
  variation 1..14: note = Description of Sequence: ASO sequence
  misc_feature 1..14: note = Note: the sequence may be DNA or RNA
  source 1..14: mol_type = other RNA
gacagggtcctgac

SEQ ID NO: 768 - RNA, 14 nt, synthetic construct
  variation 1..14: note = Description of Sequence: ASO sequence
  misc_feature 1..14: note = Note: the sequence may be DNA or RNA
  source 1..14: mol_type = other RNA
ggacagggtcctga

SEQ ID NO: 769 - RNA, 14 nt, synthetic construct
  variation 1..14: note = Description of Sequence: ASO sequence
  misc_feature 1..14: note = Note: the sequence may be DNA or RNA
  source 1..14: mol_type = other RNA
gggacagggtcctg

SEQ ID NO: 770 - RNA, 14 nt, synthetic construct
  variation 1..14: note = Description of Sequence: ASO sequence
  misc_feature 1..14: note = Note: the sequence may be DNA or RNA
  source 1..14: mol_type = other RNA
agggacagggtcct

SEQ ID NO: 771 - RNA, 14 nt, synthetic construct
  variation 1..14: note = Description of Sequence: ASO sequence
  misc_feature 1..14: note = Note: the sequence may be DNA or RNA
  source 1..14: mol_type = other RNA
cagggacagggtcc

SEQ ID NO: 772 - RNA, 14 nt, synthetic construct
  variation 1..14: note = Description of Sequence: ASO sequence
  misc_feature 1..14: note = Note: the sequence may be DNA or RNA
  source 1..14: mol_type = other RNA
tcagggacagggtc

SEQ ID NO: 773 - RNA, 14 nt, synthetic construct
  variation 1..14: note = Description of Sequence: ASO sequence
  misc_feature 1..14: note = Note: the sequence may be DNA or RNA
  source 1..14: mol_type = other RNA
ttcagggacagggt

SEQ ID NO: 774 - RNA, 14 nt, synthetic construct
  variation 1..14: note = Description of Sequence: ASO sequence
  misc_feature 1..14: note = Note: the sequence may be DNA or RNA
  source 1..14: mol_type = other RNA
gttcagggacaggg

SEQ ID NO: 775 - RNA, 14 nt, synthetic construct
  variation 1..14: note = Description of Sequence: ASO sequence
  misc_feature 1..14: note = Note: the sequence may be DNA or RNA
  source 1..14: mol_type = other RNA
ggttcagggacagg

SEQ ID NO: 776 - RNA, 14 nt, synthetic construct
  variation 1..14: note = Description of Sequence: ASO sequence
  misc_feature 1..14: note = Note: the sequence may be DNA or RNA
  source 1..14: mol_type = other RNA
gggttcagggacag

SEQ ID NO: 777 - RNA, 14 nt, synthetic construct
  variation 1..14: note = Description of Sequence: ASO sequence
  misc_feature 1..14: note = Note: the sequence may be DNA or RNA
  source 1..14: mol_type = other RNA
ggggttcagggaca

SEQ ID NO: 778 - RNA, 14 nt, synthetic construct
  variation 1..14: note = Description of Sequence: ASO sequence
  misc_feature 1..14: note = Note: the sequence may be DNA or RNA
  source 1..14: mol_type = other RNA
gggggttcagggac

SEQ ID NO: 779 - RNA, 14 nt, synthetic construct
  variation 1..14: note = Description of Sequence: ASO sequence
  misc_feature 1..14: note = Note: the sequence may be DNA or RNA
  source 1..14: mol_type = other RNA
cgggggttcaggga

SEQ ID NO: 780 - RNA, 14 nt, synthetic construct
  variation 1..14: note = Description of Sequence: ASO sequence
  misc_feature 1..14: note = Note: the sequence may be DNA or RNA
  source 1..14: mol_type = other RNA
tcgggggttcaggg

SEQ ID NO: 781 - RNA, 14 nt, synthetic construct
  variation 1..14: note = Description of Sequence: ASO sequence
  misc_feature 1..14: note = Note: the sequence may be DNA or RNA
  source 1..14: mol_type = other RNA
ctcgggggttcagg

SEQ ID NO: 782 - RNA, 14 nt, synthetic construct
  variation 1..14: note = Description of Sequence: ASO sequence
  misc_feature 1..14: note = Note: the sequence may be DNA or RNA
  source 1..14: mol_type = other RNA
cctcgggggttcag

SEQ ID NO: 783 - RNA, 14 nt, synthetic construct
  variation 1..14: note = Description of Sequence: ASO sequence
  misc_feature 1..14: note = Note: the sequence may be DNA or RNA
  source 1..14: mol_type = other RNA
tcctcgggggttca

SEQ ID NO: 784 - RNA, 14 nt, synthetic construct
  variation 1..14: note = Description of Sequence: ASO sequence
  misc_feature 1..14: note = Note: the sequence may be DNA or RNA
  source 1..14: mol_type = other RNA
ttcctcgggggttc

SEQ ID NO: 785 - RNA, 14 nt, synthetic construct
  variation 1..14: note = Description of Sequence: ASO sequence
  misc_feature 1..14: note = Note: the sequence may be DNA or RNA
  source 1..14: mol_type = other RNA
gttcctcgggggtt

SEQ ID NO: 786 - RNA, 14 nt, synthetic construct
  variation 1..14: note = Description of Sequence: ASO sequence
  misc_feature 1..14: note = Note: the sequence may be DNA or RNA
  source 1..14: mol_type = other RNA
agttcctcgggggt

SEQ ID NO: 787 - RNA, 14 nt, synthetic construct
  variation 1..14: note = Description of Sequence: ASO sequence
  misc_feature 1..14: note = Note: the sequence may be DNA or RNA
  source 1..14: mol_type = other RNA
cagttcctcggggg

SEQ ID NO: 788 - RNA, 14 nt, synthetic construct
  variation 1..14: note = Description of Sequence: ASO sequence
  misc_feature 1..14: note = Note: the sequence may be DNA or RNA
  source 1..14: mol_type = other RNA
gcagttcctcgggg

SEQ ID NO: 789 - RNA, 14 nt, synthetic construct
  variation 1..14: note = Description of Sequence: ASO sequence
  misc_feature 1..14: note = Note: the sequence may be DNA or RNA
  source 1..14: mol_type = other RNA
agcagttcctcggg

SEQ ID NO: 790 - RNA, 14 nt, synthetic construct
  variation 1..14: note = Description of Sequence: ASO sequence
  misc_feature 1..14: note = Note: the sequence may be DNA or RNA
  source 1..14: mol_type = other RNA
gagcagttcctcgg

SEQ ID NO: 791 - RNA, 14 nt, synthetic construct
  variation 1..14: note = Description of Sequence: ASO sequence
  misc_feature 1..14: note = Note: the sequence may be DNA or RNA
  source 1..14: mol_type = other RNA
ggagcagttcctcg

SEQ ID NO: 792 - RNA, 14 nt, synthetic construct
  variation 1..14: note = Description of Sequence: ASO sequence
  misc_feature 1..14: note = Note: the sequence may be DNA or RNA
  source 1..14: mol_type = other RNA
tggagcagttcctc

SEQ ID NO: 793 - RNA, 14 nt, synthetic construct
  variation 1..14: note = Description of Sequence: ASO sequence
  misc_feature 1..14: note = Note: the sequence may be DNA or RNA
  source 1..14: mol_type = other RNA
gtggagcagttcct

SEQ ID NO: 794 - RNA, 14 nt, synthetic construct
  variation 1..14: note = Description of Sequence: ASO sequence
  misc_feature 1..14: note = Note: the sequence may be DNA or RNA
  source 1..14: mol_type = other RNA
agtggagcagttcc

SEQ ID NO: 795 - RNA, 14 nt, synthetic construct
  variation 1..14: note = Description of Sequence: ASO sequence
  misc_feature 1..14: note = Note: the sequence may be DNA or RNA
  source 1..14: mol_type = other RNA
cagtggagcagttc

SEQ ID NO: 796 - RNA, 14 nt, synthetic construct
  variation 1..14: note = Description of Sequence: ASO sequence
  misc_feature 1..14: note = Note: the sequence may be DNA or RNA
  source 1..14: mol_type = other RNA
ccagtggagcagtt

SEQ ID NO: 797 - RNA, 14 nt, synthetic construct
  variation 1..14: note = Description of Sequence: ASO sequence
  misc_feature 1..14: note = Note: the sequence may be DNA or RNA
  source 1..14: mol_type = other RNA
gccagtggagcagt

SEQ ID NO: 798 - RNA, 14 nt, synthetic construct
  variation 1..14: note = Description of Sequence: ASO sequence
  misc_feature 1..14: note = Note: the sequence may be DNA or RNA
  source 1..14: mol_type = other RNA
agccagtggagcag

SEQ ID NO: 799 - RNA, 14 nt, synthetic construct
  variation 1..14: note = Description of Sequence: ASO sequence
  misc_feature 1..14: note = Note: the sequence may be DNA or RNA
  source 1..14: mol_type = other RNA
aagccagtggagca

SEQ ID NO: 800 - RNA, 14 nt, synthetic construct
  variation 1..14: note = Description of Sequence: ASO sequence
  misc_feature 1..14: note = Note: the sequence may be DNA or RNA
  source 1..14: mol_type = other RNA
aaagccagtggagc

SEQ ID NO: 801 - RNA, 14 nt, synthetic construct
  variation 1..14: note = Description of Sequence: ASO sequence
  misc_feature 1..14: note = Note: the sequence may be DNA or RNA
  source 1..14: mol_type = other RNA
tcctcacagatgcc

SEQ ID NO: 802 - RNA, 14 nt, synthetic construct
  variation 1..14: note = Description of Sequence: ASO sequence
  misc_feature 1..14: note = Note: the sequence may be DNA or RNA
  source 1..14: mol_type = other RNA
ctcctcacagatgc

SEQ ID NO: 803 - RNA, 14 nt, synthetic construct
  variation 1..14: note = Description of Sequence: ASO sequence
  misc_feature 1..14: note = Note: the sequence may be DNA or RNA
  source 1..14: mol_type = other RNA
gctcctcacagatg

SEQ ID NO: 804 - RNA, 14 nt, synthetic construct
  variation 1..14: note = Description of Sequence: ASO sequence
  misc_feature 1..14: note = Note: the sequence may be DNA or RNA
  source 1..14: mol_type = other RNA
agctcctcacagat

SEQ ID NO: 805 - RNA, 14 nt, synthetic construct
  variation 1..14: note = Description of Sequence: ASO sequence
  misc_feature 1..14: note = Note: the sequence may be DNA or RNA
  source 1..14: mol_type = other RNA
gagctcctcacaga

SEQ ID NO: 806 - RNA, 14 nt, synthetic construct
  variation 1..14: note = Description of Sequence: ASO sequence
  misc_feature 1..14: note = Note: the sequence may be DNA or RNA
  source 1..14: mol_type = other RNA
ggagctcctcacag

SEQ ID NO: 807 - RNA, 14 nt, synthetic construct
  variation 1..14: note = Description of Sequence: ASO sequence
  misc_feature 1..14: note = Note: the sequence may be DNA or RNA
  source 1..14: mol_type = other RNA
aggagctcctcaca

SEQ ID NO: 808 - RNA, 14 nt, synthetic construct
  variation 1..14: note = Description of Sequence: ASO sequence
  misc_feature 1..14: note = Note: the sequence may be DNA or RNA
  source 1..14: mol_type = other RNA
caggagctcctcac

SEQ ID NO: 809 - RNA, 14 nt, synthetic construct
  variation 1..14: note = Description of Sequence: ASO sequence
  misc_feature 1..14: note = Note: the sequence may be DNA or RNA
  source 1..14: mol_type = other RNA
gcaggagctcctca

SEQ ID NO: 810 - RNA, 14 nt, synthetic construct
  variation 1..14: note = Description of Sequence: ASO sequence
  misc_feature 1..14: note = Note: the sequence may be DNA or RNA
  source 1..14: mol_type = other RNA
tgcaggagctcctc

SEQ ID NO: 811 - RNA, 14 nt, synthetic construct
  variation 1..14: note = Description of Sequence: ASO sequence
  misc_feature 1..14: note = Note: the sequence may be DNA or RNA
  source 1..14: mol_type = other RNA
gtgcaggagctcct

SEQ ID NO: 812 - RNA, 14 nt, synthetic construct
  variation 1..14: note = Description of Sequence: ASO sequence
  misc_feature 1..14: note = Note: the sequence may be DNA or RNA
  source 1..14: mol_type = other RNA
cgtgcaggagctcc

SEQ ID NO: 813 - RNA, 14 nt, synthetic construct
  variation 1..14: note = Description of Sequence: ASO sequence
  misc_feature 1..14: note = Note: the sequence may be DNA or RNA
  source 1..14: mol_type = other RNA
ccgtgcaggagctc

SEQ ID NO: 814 - RNA, 14 nt, synthetic construct
  variation 1..14: note = Description of Sequence: ASO sequence
  misc_feature 1..14: note = Note: the sequence may be DNA or RNA
  source 1..14: mol_type = other RNA
gccgtgcaggagct

SEQ ID NO: 815 - RNA, 14 nt, synthetic construct
  variation 1..14: note = Description of Sequence: ASO sequence
  misc_feature 1..14: note = Note: the sequence may be DNA or RNA
  source 1..14: mol_type = other RNA
ggccgtgcaggagc

SEQ ID NO: 816 - RNA, 14 nt, synthetic construct
  variation 1..14: note = Description of Sequence: ASO sequence
  misc_feature 1..14: note = Note: the sequence may be DNA or RNA
  source 1..14: mol_type = other RNA
tggccgtgcaggag

SEQ ID NO: 817 - RNA, 14 nt, synthetic construct
  variation 1..14: note = Description of Sequence: ASO sequence
  misc_feature 1..14: note = Note: the sequence may be DNA or RNA
  source 1..14: mol_type = other RNA
ctggccgtgcagga

SEQ ID NO: 818 - RNA, 14 nt, synthetic construct
  variation 1..14: note = Description of Sequence: ASO sequence
  misc_feature 1..14: note = Note: the sequence may be DNA or RNA
  source 1..14: mol_type = other RNA
gctggccgtgcagg

SEQ ID NO: 819 - RNA, 14 nt, synthetic construct
  variation 1..14: note = Description of Sequence: ASO sequence
  misc_feature 1..14: note = Note: the sequence may be DNA or RNA
  source 1..14: mol_type = other RNA
agctggccgtgcag

SEQ ID NO: 820 - RNA, 14 nt, synthetic construct
  variation 1..14: note = Description of Sequence: ASO sequence
  misc_feature 1..14: note = Note: the sequence may be DNA or RNA
  source 1..14: mol_type = other RNA
cagctggccgtgca

SEQ ID NO: 821 - RNA, 14 nt, synthetic construct
  variation 1..14: note = Description of Sequence: ASO sequence
  misc_feature 1..14: note = Note: the sequence may be DNA or RNA
  source 1..14: mol_type = other RNA
acagctggccgtgc

SEQ ID NO: 822 - RNA, 14 nt, synthetic construct
  variation 1..14: note = Description of Sequence: ASO sequence
  misc_feature 1..14: note = Note: the sequence may be DNA or RNA
  source 1..14: mol_type = other RNA
aacagctggccgtg

SEQ ID NO: 823 - RNA, 14 nt, synthetic construct
  variation 1..14: note = Description of Sequence: ASO sequence
  misc_feature 1..14: note = Note: the sequence may be DNA or RNA
  source 1..14: mol_type = other RNA
gaacagctggccgt

SEQ ID NO: 824 - RNA, 14 nt, synthetic construct
  variation 1..14: note = Description of Sequence: ASO sequence
  misc_feature 1..14: note = Note: the sequence may be DNA or RNA
  source 1..14: mol_type = other RNA
agaacagctggccg

SEQ ID NO: 825 - RNA, 14 nt, synthetic construct
  variation 1..14: note = Description of Sequence: ASO sequence
  misc_feature 1..14: note = Note: the sequence may be DNA or RNA
  source 1..14: mol_type = other RNA
gagaacagctggcc

SEQ ID NO: 826 - RNA, 14 nt, synthetic construct
  variation 1..14: note = Description of Sequence: ASO sequence
  misc_feature 1..14: note = Note: the sequence may be DNA or RNA
  source 1..14: mol_type = other RNA
agagaacagctggc

SEQ ID NO: 827 - RNA, 14 nt, synthetic construct
  variation 1..14: note = Description of Sequence: ASO sequence
  misc_feature 1..14: note = Note: the sequence may be DNA or RNA
  source 1..14: mol_type = other RNA
cagagaacagctgg

SEQ ID NO: 828 - RNA, 14 nt, synthetic construct
  variation 1..14: note = Description of Sequence: ASO sequence
  misc_feature 1..14: note = Note: the sequence may be DNA or RNA
  source 1..14: mol_type = other RNA
ccagagaacagctg

SEQ ID NO: 829 - RNA, 14 nt, synthetic construct
  variation 1..14: note = Description of Sequence: ASO sequence
  misc_feature 1..14: note = Note: the sequence may be DNA or RNA
  source 1..14: mol_type = other RNA
gccagagaacagct

SEQ ID NO: 830 - RNA, 14 nt, synthetic construct
  variation 1..14: note = Description of Sequence: ASO sequence
  misc_feature 1..14: note = Note: the sequence may be DNA or RNA
  source 1..14: mol_type = other RNA
agccagagaacagc

SEQ ID NO: 831 - RNA, 14 nt, synthetic construct
  variation 1..14: note = Description of Sequence: ASO sequence
  misc_feature 1..14: note = Note: the sequence may be DNA or RNA
  source 1..14: mol_type = other RNA
cagccagagaacag

SEQ ID NO: 832 - RNA, 14 nt, synthetic construct
  variation 1..14: note = Description of Sequence: ASO sequence
  misc_feature 1..14: note = Note: the sequence may be DNA or RNA
  source 1..14: mol_type = other RNA
gcagccagagaaca

SEQ ID NO: 833 - RNA, 14 nt, synthetic construct
  variation 1..14: note = Description of Sequence: ASO sequence
  misc_feature 1..14: note = Note: the sequence may be DNA or RNA
  source 1..14: mol_type = other RNA
cgcagccagagaac

SEQ ID NO: 834 - RNA, 14 nt, synthetic construct
  variation 1..14: note = Description of Sequence: ASO sequence
  misc_feature 1..14: note = Note: the sequence may be DNA or RNA
  source 1..14: mol_type = other RNA
acgcagccagagaa

SEQ ID NO: 835 - RNA, 14 nt, synthetic construct
  variation 1..14: note = Description of Sequence: ASO sequence
  misc_feature 1..14: note = Note: the sequence may be DNA or RNA
  source 1..14: mol_type = other RNA
cacgcagccagaga

SEQ ID NO: 836 - RNA, 14 nt, synthetic construct
  variation 1..14: note = Description of Sequence: ASO sequence
  misc_feature 1..14: note = Note: the sequence may be DNA or RNA
  source 1..14: mol_type = other RNA
ccacgcagccagag

SEQ ID NO: 837 - RNA, 14 nt, synthetic construct
  variation 1..14: note = Description of Sequence: ASO sequence
  misc_feature 1..14: note = Note: the sequence may be DNA or RNA
  source 1..14: mol_type = other RNA
gccacgcagccaga

SEQ ID NO: 838 - RNA, 14 nt, synthetic construct
  variation 1..14: note = Description of Sequence: ASO sequence
  misc_feature 1..14: note = Note: the sequence may be DNA or RNA
  source 1..14: mol_type = other RNA
ggccacgcagccag

SEQ ID NO: 839 - RNA, 14 nt, synthetic construct
  variation 1..14: note = Description of Sequence: ASO sequence
  misc_feature 1..14: note = Note: the sequence may be DNA or RNA
  source 1..14: mol_type = other RNA
gggccacgcagcca

SEQ ID NO: 840 - RNA, 14 nt, synthetic construct
  variation 1..14: note = Description of Sequence: ASO sequence
  misc_feature 1..14: note = Note: the sequence may be DNA or RNA
  source 1..14: mol_type = other RNA
agggccacgcagcc

SEQ ID NO: 841 - RNA, 14 nt, synthetic construct
  variation 1..14: note = Description of Sequence: ASO sequence
  misc_feature 1..14: note = Note: the sequence may be DNA or RNA
  source 1..14: mol_type = other RNA
cagggccacgcagc

SEQ ID NO: 842 - RNA, 14 nt, synthetic construct
  variation 1..14: note = Description of Sequence: ASO sequence
  misc_feature 1..14: note = Note: the sequence may be DNA or RNA
  source 1..14: mol_type = other RNA
ccagggccacgcag

SEQ ID NO: 843 - RNA, 14 nt, synthetic construct
  variation 1..14: note = Description of Sequence: ASO sequence
  misc_feature 1..14: note = Note: the sequence may be DNA or RNA
  source 1..14: mol_type = other RNA
accagggccacgca

SEQ ID NO: 844 - RNA, 14 nt, synthetic construct
  variation 1..14: note = Description of Sequence: ASO sequence
  misc_feature 1..14: note = Note: the sequence may be DNA or RNA
  source 1..14: mol_type = other RNA
caccagggccacgc

SEQ ID NO: 845 - RNA, 14 nt, synthetic construct
  variation 1..14: note = Description of Sequence: ASO sequence
  misc_feature 1..14: note = Note: the sequence may be DNA or RNA
  source 1..14: mol_type = other RNA
ccaccagggccacg

SEQ ID NO: 846 - RNA, 14 nt, synthetic construct
  variation 1..14: note = Description of Sequence: ASO sequence
  misc_feature 1..14: note = Note: the sequence may be DNA or RNA
  source 1..14: mol_type = other RNA
tccaccagggccac

SEQ ID NO: 847 - RNA, 14 nt, synthetic construct
  variation 1..14: note = Description of Sequence: ASO sequence
  misc_feature 1..14: note = Note: the sequence may be DNA or RNA
  source 1..14: mol_type = other RNA
gtccaccagggcca

SEQ ID NO: 848 - RNA, 14 nt, synthetic construct
  variation 1..14: note = Description of Sequence: ASO sequence
  misc_feature 1..14: note = Note: the sequence may be DNA or RNA
  source 1..14: mol_type = other RNA
cgtccaccagggcc

SEQ ID NO: 849 - RNA, 14 nt, synthetic construct
  variation 1..14: note = Description of Sequence: ASO sequence
  misc_feature 1..14: note = Note: the sequence may be DNA or RNA
  source 1..14: mol_type = other RNA
acgtccaccagggc

SEQ ID NO: 850 - RNA, 14 nt, synthetic construct
  variation 1..14: note = Description of Sequence: ASO sequence
  misc_feature 1..14: note = Note: the sequence may be DNA or RNA
  source 1..14: mol_type = other RNA
gacgtccaccaggg

SEQ ID NO: 851 - RNA, 14 nt, synthetic construct
  variation 1..14: note = Description of Sequence: ASO sequence
  misc_feature 1..14: note = Note: the sequence may be DNA or RNA
  source 1..14: mol_type = other RNA
cgacgtccaccagg

SEQ ID NO: 852 - RNA, 14 nt, synthetic construct
  variation 1..14: note = Description of Sequence: ASO sequence
  misc_feature 1..14: note = Note: the sequence may be DNA or RNA
  source 1..14: mol_type = other RNA
ccgacgtccaccag

SEQ ID NO: 853 - RNA, 14 nt, synthetic construct
  variation 1..14: note = Description of Sequence: ASO sequence
  misc_feature 1..14: note = Note: the sequence may be DNA or RNA
  source 1..14: mol_type = other RNA
gccgacgtccacca

SEQ ID NO: 854 - RNA, 14 nt, synthetic construct
  variation 1..14: note = Description of Sequence: ASO sequence
  misc_feature 1..14: note = Note: the sequence may be DNA or RNA
  source 1..14: mol_type = other RNA
tgccgacgtccacc

SEQ ID NO: 855 - RNA, 14 nt, synthetic construct
  variation 1..14: note = Description of Sequence: ASO sequence
  misc_feature 1..14: note = Note: the sequence may be DNA or RNA
  source 1..14: mol_type = other RNA
ctgccgacgtccac

SEQ ID NO: 856 - RNA, 14 nt, synthetic construct
  variation 1..14: note = Description of Sequence: ASO sequence
  misc_feature 1..14: note = Note: the sequence may be DNA or RNA
  source 1..14: mol_type = other RNA
gctgccgacgtcca

SEQ ID NO: 857 - RNA, 14 nt, synthetic construct
  variation 1..14: note = Description of Sequence: ASO sequence
  misc_feature 1..14: note = Note: the sequence may be DNA or RNA
  source 1..14: mol_type = other RNA
agctgccgacgtcc

SEQ ID NO: 858 - RNA, 14 nt, synthetic construct
  variation 1..14: note = Description of Sequence: ASO sequence
  misc_feature 1..14: note = Note: the sequence may be DNA or RNA
  source 1..14: mol_type = other RNA
tagctgccgacgtc

SEQ ID NO: 859 - RNA, 14 nt, synthetic construct
  variation 1..14: note = Description of Sequence: ASO sequence
  misc_feature 1..14: note = Note: the sequence may be DNA or RNA
  source 1..14: mol_type = other RNA
gtagctgccgacgt

SEQ ID NO: 860 - RNA, 14 nt, synthetic construct
  variation 1..14: note = Description of Sequence: ASO sequence
  misc_feature 1..14: note = Note: the sequence may be DNA or RNA
  source 1..14: mol_type = other RNA
ggtagctgccgacg

SEQ ID NO: 861 - RNA, 14 nt, synthetic construct
  variation 1..14: note = Description of Sequence: ASO sequence
  misc_feature 1..14: note = Note: the sequence may be DNA or RNA
  source 1..14: mol_type = other RNA
aggtagctgccgac

SEQ ID NO: 862 - RNA, 14 nt, synthetic construct
  variation 1..14: note = Description of Sequence: ASO sequence
  misc_feature 1..14: note = Note: the sequence may be DNA or RNA
  source 1..14: mol_type = other RNA
caggtagctgccga

SEQ ID NO: 863 - RNA, 14 nt, synthetic construct
  variation 1..14: note = Description of Sequence: ASO sequence
  misc_feature 1..14: note = Note: the sequence may be DNA or RNA
  source 1..14: mol_type = other RNA
ccaggtagctgccg

SEQ ID NO: 864 - RNA, 14 nt, synthetic construct
  variation 1..14: note = Description of Sequence: ASO sequence
  misc_feature 1..14: note = Note: the sequence may be DNA or RNA
  source 1..14: mol_type = other RNA
tccaggtagctgcc

SEQ ID NO: 865 - RNA, 14 nt, synthetic construct
  variation 1..14: note = Description of Sequence: ASO sequence
  misc_feature 1..14: note = Note: the sequence may be DNA or RNA
  source 1..14: mol_type = other RNA
ctccaggtagctgc

SEQ ID NO: 866 - RNA, 14 nt, synthetic construct
  variation 1..14: note = Description of Sequence: ASO sequence
  misc_feature 1..14: note = Note: the sequence may be DNA or RNA
  source 1..14: mol_type = other RNA
cctccaggtagctg

SEQ ID NO: 867 - RNA, 14 nt, synthetic construct
  variation 1..14: note = Description of Sequence: ASO sequence
  misc_feature 1..14: note = Note: the sequence may be DNA or RNA
  source 1..14: mol_type = other RNA
gcctccaggtagct

SEQ ID NO: 868 - RNA, 14 nt, synthetic construct
  variation 1..14: note = Description of Sequence: ASO sequence
  misc_feature 1..14: note = Note: the sequence may be DNA or RNA
  source 1..14: mol_type = other RNA
agcctccaggtagc

SEQ ID NO: 869 - RNA, 14 nt, synthetic construct
  variation 1..14: note = Description of Sequence: ASO sequence
  misc_feature 1..14: note = Note: the sequence may be DNA or RNA
  source 1..14: mol_type = other RNA
aagcctccaggtag

SEQ ID NO: 870 - RNA, 14 nt, synthetic construct
  variation 1..14: note = Description of Sequence: ASO sequence
  misc_feature 1..14: note = Note: the sequence may be DNA or RNA
  source 1..14: mol_type = other RNA
caagcctccaggta

SEQ ID NO: 871 - RNA, 14 nt, synthetic construct
  variation 1..14: note = Description of Sequence: ASO sequence
  misc_feature 1..14: note = Note: the sequence may be DNA or RNA
  source 1..14: mol_type = other RNA
gcaagcctccaggt

SEQ ID NO: 872 - RNA, 14 nt, synthetic construct
  variation 1..14: note = Description of Sequence: ASO sequence
  misc_feature 1..14: note = Note: the sequence may be DNA or RNA
  source 1..14: mol_type = other RNA
tgcaagcctccagg

SEQ ID NO: 873 - RNA, 14 nt, synthetic construct
  variation 1..14: note = Description of Sequence: ASO sequence
  misc_feature 1..14: note = Note: the sequence may be DNA or RNA
  source 1..14: mol_type = other RNA
ctgcaagcctccag

SEQ ID NO: 874 - RNA, 14 nt, synthetic construct
  variation 1..14: note = Description of Sequence: ASO sequence
  misc_feature 1..14: note = Note: the sequence may be DNA or RNA
  source 1..14: mol_type = other RNA
cctgcaagcctcca

SEQ ID NO: 875 - RNA, 14 nt, synthetic construct
  variation 1..14: note = Description of Sequence: ASO sequence
  misc_feature 1..14: note = Note: the sequence may be DNA or RNA
  source 1..14: mol_type = other RNA
gcctgcaagcctcc

SEQ ID NO: 876 - RNA, 14 nt, synthetic construct
  variation 1..14: note = Description of Sequence: ASO sequence
  misc_feature 1..14: note = Note: the sequence may be DNA or RNA
  source 1..14: mol_type = other RNA
tgcctgcaagcctc

SEQ ID NO: 877 - RNA, 14 nt, synthetic construct
  variation 1..14: note = Description of Sequence: ASO sequence
  misc_feature 1..14: note = Note: the sequence may be DNA or RNA
  source 1..14: mol_type = other RNA
ttgcctgcaagcct

SEQ ID NO: 878 - RNA, 14 nt, synthetic construct
  variation 1..14: note = Description of Sequence: ASO sequence
  misc_feature 1..14: note = Note: the sequence may be DNA or RNA
  source 1..14: mol_type = other RNA
cttgcctgcaagcc

SEQ ID NO: 879 - RNA, 14 nt, synthetic construct
  variation 1..14: note = Description of Sequence: ASO sequence
  misc_feature 1..14: note = Note: the sequence may be DNA or RNA
  source 1..14: mol_type = other RNA
tcttgcctgcaagc

SEQ ID NO: 880 - RNA, 14 nt, synthetic construct
  variation 1..14: note = Description of Sequence: ASO sequence
  misc_feature 1..14: note = Note: the sequence may be DNA or RNA
  source 1..14: mol_type = other RNA
gtcttgcctgcaag

SEQ ID NO: 881 - RNA, 14 nt, synthetic construct
  variation 1..14: note = Description of Sequence: ASO sequence
  misc_feature 1..14: note = Note: the sequence may be DNA or RNA
  source 1..14: mol_type = other RNA
ggtcttgcctgcaa

SEQ ID NO: 882 - RNA, 14 nt, synthetic construct
  variation 1..14: note = Description of Sequence: ASO sequence
  misc_feature 1..14: note = Note: the sequence may be DNA or RNA
  source 1..14: mol_type = other RNA
aggtcttgcctgca

SEQ ID NO: 883 - RNA, 14 nt, synthetic construct
  variation 1..14: note = Description of Sequence: ASO sequence
  misc_feature 1..14: note = Note: the sequence may be DNA or RNA
  source 1..14: mol_type = other RNA
gaggtcttgcctgc

SEQ ID NO: 884 - RNA, 14 nt, synthetic construct
  variation 1..14: note = Description of Sequence: ASO sequence
  misc_feature 1..14: note = Note: the sequence may be DNA or RNA
  source 1..14: mol_type = other RNA
agaggtcttgcctg

SEQ ID NO: 885 - RNA, 14 nt, synthetic construct
  variation 1..14: note = Description of Sequence: ASO sequence
  misc_feature 1..14: note = Note: the sequence may be DNA or RNA
  source 1..14: mol_type = other RNA
cagaggtcttgcct

SEQ ID NO: 886 - RNA, 14 nt, synthetic construct
  variation 1..14: note = Description of Sequence: ASO sequence
  misc_feature 1..14: note = Note: the sequence may be DNA or RNA
  source 1..14: mol_type = other RNA
gcagaggtcttgcc

SEQ ID NO: 887 - RNA, 14 nt, synthetic construct
  variation 1..14: note = Description of Sequence: ASO sequence
  misc_feature 1..14: note = Note: the sequence may be DNA or RNA
  source 1..14: mol_type = other RNA
agcagaggtcttgc

SEQ ID NO: 888 - RNA, 14 nt, synthetic construct
  variation 1..14: note = Description of Sequence: ASO sequence
  misc_feature 1..14: note = Note: the sequence may be DNA or RNA
  source 1..14: mol_type = other RNA
aagcagaggtcttg

SEQ ID NO: 889 - RNA, 14 nt, synthetic construct
  variation 1..14: note = Description of Sequence: ASO sequence
  misc_feature 1..14: note = Note: the sequence may be DNA or RNA
  source 1..14: mol_type = other RNA
gaagcagaggtctt

SEQ ID NO: 890 - RNA, 14 nt, synthetic construct
  variation 1..14: note = Description of Sequence: ASO sequence
  misc_feature 1..14: note = Note: the sequence may be DNA or RNA
  source 1..14: mol_type = other RNA
agaagcagaggtct

SEQ ID NO: 891 - RNA, 14 nt, synthetic construct
  variation 1..14: note = Description of Sequence: ASO sequence
  misc_feature 1..14: note = Note: the sequence may be DNA or RNA
  source 1..14: mol_type = other RNA
cagaagcagaggtc

SEQ ID NO: 892 - RNA, 14 nt, synthetic construct
  variation 1..14: note = Description of Sequence: ASO sequence
  misc_feature 1..14: note = Note: the sequence may be DNA or RNA
  source 1..14: mol_type = other RNA
acagaagcagaggt

SEQ ID NO: 893 - RNA, 14 nt, synthetic construct
  variation 1..14: note = Description of Sequence: ASO sequence
  misc_feature 1..14: note = Note: the sequence may be DNA or RNA
  source 1..14: mol_type = other RNA
cacagaagcagagg

SEQ ID NO: 894 - RNA, 14 nt, synthetic construct
  variation 1..14: note = Description of Sequence: ASO sequence
  misc_feature 1..14: note = Note: the sequence may be DNA or RNA
  source 1..14: mol_type = other RNA
tcacagaagcagag

SEQ ID NO: 895 - RNA, 14 nt, synthetic construct
  variation 1..14: note = Description of Sequence: ASO sequence
  misc_feature 1..14: note = Note: the sequence may be DNA or RNA
  source 1..14: mol_type = other RNA
ttcacagaagcaga

SEQ ID NO: 896 - RNA, 14 nt, synthetic construct
  variation 1..14: note = Description of Sequence: ASO sequence
  misc_feature 1..14: note = Note: the sequence may be DNA or RNA
  source 1..14: mol_type = other RNA
cttcacagaagcag

SEQ ID NO: 897 - RNA, 14 nt, synthetic construct
  variation 1..14: note = Description of Sequence: ASO sequence
  misc_feature 1..14: note = Note: the sequence may be DNA or RNA
  source 1..14: mol_type = other RNA
tcttcacagaagca

SEQ ID NO: 898 - RNA, 14 nt, synthetic construct
  variation 1..14: note = Description of Sequence: ASO sequence
  misc_feature 1..14: note = Note: the sequence may be DNA or RNA
  source 1..14: mol_type = other RNA
gtcttcacagaagc

SEQ ID NO: 899 - RNA, 14 nt, synthetic construct
  variation 1..14: note = Description of Sequence: ASO sequence
  misc_feature 1..14: note = Note: the sequence may be DNA or RNA
  source 1..14: mol_type = other RNA
tgtcttcacagaag

SEQ ID NO: 900 - RNA, 14 nt, synthetic construct
  variation 1..14: note = Description of Sequence: ASO sequence
  misc_feature 1..14: note = Note: the sequence may be DNA or RNA
  source 1..14: mol_type = other RNA
gtgtcttcacagaa

SEQ ID NO: 901 - RNA, 14 nt, synthetic construct
  variation 1..14: note = Description of Sequence: ASO sequence
  misc_feature 1..14: note = Note: the sequence may be DNA or RNA
  source 1..14: mol_type = other RNA
ggtgtcttcacaga

SEQ ID NO: 902 - RNA, 14 nt, synthetic construct
  variation 1..14: note = Description of Sequence: ASO sequence
  misc_feature 1..14: note = Note: the sequence may be DNA or RNA
  source 1..14: mol_type = other RNA
cggtgtcttcacag

SEQ ID NO: 903 - RNA, 14 nt, synthetic construct
  variation 1..14: note = Description of Sequence: ASO sequence
  misc_feature 1..14: note = Note: the sequence may be DNA or RNA
  source 1..14: mol_type = other RNA
tcggtgtcttcaca

SEQ ID NO: 904 - RNA, 14 nt, synthetic construct
  variation 1..14: note = Description of Sequence: ASO sequence
  misc_feature 1..14: note = Note: the sequence may be DNA or RNA
  source 1..14: mol_type = other RNA
gtcggtgtcttcac

SEQ ID NO: 905 - RNA, 14 nt, synthetic construct
  variation 1..14: note = Description of Sequence: ASO sequence
  misc_feature 1..14: note = Note: the sequence may be DNA or RNA
  source 1..14: mol_type = other RNA
ggtcggtgtcttca

SEQ ID NO: 906 - RNA, 14 nt, synthetic construct
  variation 1..14: note = Description of Sequence: ASO sequence
  misc_feature 1..14: note = Note: the sequence may be DNA or RNA
  source 1..14: mol_type = other RNA
aggtcggtgtcttc

SEQ ID NO: 907 - RNA, 14 nt, synthetic construct
  variation 1..14: note = Description of Sequence: ASO sequence
  misc_feature 1..14: note = Note: the sequence may be DNA or RNA
  source 1..14: mol_type = other RNA
caggtcggtgtctt

SEQ ID NO: 908 - RNA, 14 nt, synthetic construct
  variation 1..14: note = Description of Sequence: ASO sequence
  misc_feature 1..14: note = Note: the sequence may be DNA or RNA
  source 1..14: mol_type = other RNA
gcaggtcggtgtct

SEQ ID NO: 909 - RNA, 14 nt, synthetic construct
  variation 1..14: note = Description of Sequence: ASO sequence
  misc_feature 1..14: note = Note: the sequence may be DNA or RNA
  source 1..14: mol_type = other RNA
agcaggtcggtgtc

SEQ ID NO: 910 - RNA, 14 nt, synthetic construct
  variation 1..14: note = Description of Sequence: ASO sequence
  misc_feature 1..14: note = Note: the sequence may be DNA or RNA
  source 1..14: mol_type = other RNA
gagcaggtcggtgt

SEQ ID NO: 911 - RNA, 14 nt, synthetic construct
  variation 1..14: note = Description of Sequence: ASO sequence
  misc_feature 1..14: note = Note: the sequence may be DNA or RNA
  source 1..14: mol_type = other RNA
tgagcaggtcggtg

SEQ ID NO: 912 - RNA, 14 nt, synthetic construct
  variation 1..14: note = Description of Sequence: ASO sequence
  misc_feature 1..14: note = Note: the sequence may be DNA or RNA
  source 1..14: mol_type = other RNA
ctgagcaggtcggt

SEQ ID NO: 913 - RNA, 14 nt, synthetic construct
  variation 1..14: note = Description of Sequence: ASO sequence
  misc_feature 1..14: note = Note: the sequence may be DNA or RNA
  source 1..14: mol_type = other RNA
gctgagcaggtcgg

SEQ ID NO: 914 - RNA, 14 nt, synthetic construct
  variation 1..14: note = Description of Sequence: ASO sequence
  misc_feature 1..14: note = Note: the sequence may be DNA or RNA
  source 1..14: mol_type = other RNA
agctgagcaggtcg

SEQ ID NO: 915 - RNA, 14 nt, synthetic construct
  variation 1..14: note = Description of Sequence: ASO sequence
  misc_feature 1..14: note = Note: the sequence may be DNA or RNA
  source 1..14: mol_type = other RNA
cagctgagcaggtc

SEQ ID NO: 916 - RNA, 14 nt, synthetic construct
  variation 1..14: note = Description of Sequence: ASO sequence
  misc_feature 1..14: note = Note: the sequence may be DNA or RNA
  source 1..14: mol_type = other RNA
gcagctgagcaggt

SEQ ID NO: 917 - RNA, 14 nt, synthetic construct
  variation 1..14: note = Description of Sequence: ASO sequence
  misc_feature 1..14: note = Note: the sequence may be DNA or RNA
  source 1..14: mol_type = other RNA
cgcagctgagcagg

SEQ ID NO: 918 - RNA, 14 nt, synthetic construct
  variation 1..14: note = Description of Sequence: ASO sequence
  misc_feature 1..14: note = Note: the sequence may be DNA or RNA
  source 1..14: mol_type = other RNA
acgcagctgagcag

SEQ ID NO: 919 - RNA, 14 nt, synthetic construct
  variation 1..14: note = Description of Sequence: ASO sequence
  misc_feature 1..14: note = Note: the sequence may be DNA or RNA
  source 1..14: mol_type = other RNA
gacgcagctgagca

SEQ ID NO: 920 - RNA, 14 nt, synthetic construct
  variation 1..14: note = Description of Sequence: ASO sequence
  misc_feature 1..14: note = Note: the sequence may be DNA or RNA
  source 1..14: mol_type = other RNA
agacgcagctgagc

SEQ ID NO: 921 - RNA, 14 nt, synthetic construct
  variation 1..14: note = Description of Sequence: ASO sequence
  misc_feature 1..14: note = Note: the sequence may be DNA or RNA
  source 1..14: mol_type = other RNA
cagacgcagctgag

SEQ ID NO: 922 - RNA, 14 nt, synthetic construct
  variation 1..14: note = Description of Sequence: ASO sequence
  misc_feature 1..14: note = Note: the sequence may be DNA or RNA
  source 1..14: mol_type = other RNA
gcagacgcagctga

SEQ ID NO: 923 - RNA, 14 nt, synthetic construct
  variation 1..14: note = Description of Sequence: ASO sequence
  misc_feature 1..14: note = Note: the sequence may be DNA or RNA
  source 1..14: mol_type = other RNA
ggcagacgcagctg

SEQ ID NO: 924 - RNA, 14 nt, synthetic construct
  variation 1..14: note = Description of Sequence: ASO sequence
  misc_feature 1..14: note = Note: the sequence may be DNA or RNA
  source 1..14: mol_type = other RNA
tggcagacgcagct

SEQ ID NO: 925 - RNA, 14 nt, synthetic construct
  variation 1..14: note = Description of Sequence: ASO sequence
  misc_feature 1..14: note = Note: the sequence may be DNA or RNA
  source 1..14: mol_type = other RNA
gtggcagacgcagc

SEQ ID NO: 926 - RNA, 14 nt, synthetic construct
  variation 1..14: note = Description of Sequence: ASO sequence
  misc_feature 1..14: note = Note: the sequence may be DNA or RNA
  source 1..14: mol_type = other RNA
tgtggcagacgcag

SEQ ID NO: 927 - RNA, 14 nt, synthetic construct
  variation 1..14: note = Description of Sequence: ASO sequence
  misc_feature 1..14: note = Note: the sequence may be DNA or RNA
  source 1..14: mol_type = other RNA
gtgtggcagacgca

SEQ ID NO: 928 - RNA, 14 nt, synthetic construct
  variation 1..14: note = Description of Sequence: ASO sequence
  misc_feature 1..14: note = Note: the sequence may be DNA or RNA
  source 1..14: mol_type = other RNA
ggtgtggcagacgc

SEQ ID NO: 929 - RNA, 14 nt, synthetic construct
  variation 1..14: note = Description of Sequence: ASO sequence
  misc_feature 1..14: note = Note: the sequence may be DNA or RNA
  source 1..14: mol_type = other RNA
gggtgtggcagacg

SEQ ID NO: 930 - RNA, 14 nt, synthetic construct
  variation 1..14: note = Description of Sequence: ASO sequence
  misc_feature 1..14: note = Note: the sequence may be DNA or RNA
  source 1..14: mol_type = other RNA
agggtgtggcagac

SEQ ID NO: 931 - RNA, 14 nt, synthetic construct
  variation 1..14: note = Description of Sequence: ASO sequence
  misc_feature 1..14: note = Note: the sequence may be DNA or RNA
  source 1..14: mol_type = other RNA
aagggtgtggcaga

SEQ ID NO: 932 - RNA, 14 nt, synthetic construct
  variation 1..14: note = Description of Sequence: ASO sequence
  misc_feature 1..14: note = Note: the sequence may be DNA or RNA
  source 1..14: mol_type = other RNA
caagggtgtggcag

SEQ ID NO: 933 - RNA, 14 nt, synthetic construct
  variation 1..14: note = Description of Sequence: ASO sequence
  misc_feature 1..14: note = Note: the sequence may be DNA or RNA
  source 1..14: mol_type = other RNA
gcaagggtgtggca

SEQ ID NO: 934 - RNA, 14 nt, synthetic construct
  variation 1..14: note = Description of Sequence: ASO sequence
  misc_feature 1..14: note = Note: the sequence may be DNA or RNA
  source 1..14: mol_type = other RNA
ggcaagggtgtggc

SEQ ID NO: 935 - RNA, 14 nt, synthetic construct
  variation 1..14: note = Description of Sequence: ASO sequence
  misc_feature 1..14: note = Note: the sequence may be DNA or RNA
  source 1..14: mol_type = other RNA
cggcaagggtgtgg

SEQ ID NO: 936 - RNA, 14 nt, synthetic construct
  variation 1..14: note = Description of Sequence: ASO sequence
  misc_feature 1..14: note = Note: the sequence may be DNA or RNA
  source 1..14: mol_type = other RNA
tcggcaagggtgtg

SEQ ID NO: 937 - RNA, 14 nt, synthetic construct
  variation 1..14: note = Description of Sequence: ASO sequence
  misc_feature 1..14: note = Note: the sequence may be DNA or RNA
  source 1..14: mol_type = other RNA
ctcggcaagggtgt

SEQ ID NO: 938 - RNA, 14 nt, synthetic construct
  variation 1..14: note = Description of Sequence: ASO sequence
  misc_feature 1..14: note = Note: the sequence may be DNA or RNA
  source 1..14: mol_type = other RNA
actcggcaagggtg

SEQ ID NO: 939 - RNA, 14 nt, synthetic construct
  variation 1..14: note = Description of Sequence: ASO sequence
  misc_feature 1..14: note = Note: the sequence may be DNA or RNA
  source 1..14: mol_type = other RNA
tactcggcaagggt

SEQ ID NO: 940 - RNA, 14 nt, synthetic construct
  variation 1..14: note = Description of Sequence: ASO sequence
  misc_feature 1..14: note = Note: the sequence may be DNA or RNA
  source 1..14: mol_type = other RNA
gtactcggcaaggg

SEQ ID NO: 941 - RNA, 14 nt, synthetic construct
  variation 1..14: note = Description of Sequence: ASO sequence
  misc_feature 1..14: note = Note: the sequence may be DNA or RNA
  source 1..14: mol_type = other RNA
agtactcggcaagg

SEQ ID NO: 942 - RNA, 14 nt, synthetic construct
  variation 1..14: note = Description of Sequence: ASO sequence
  misc_feature 1..14: note = Note: the sequence may be DNA or RNA
  source 1..14: mol_type = other RNA
gagtactcggcaag

SEQ ID NO: 943 - RNA, 14 nt, synthetic construct
  variation 1..14: note = Description of Sequence: ASO sequence
  misc_feature 1..14: note = Note: the sequence may be DNA or RNA
  source 1..14: mol_type = other RNA
ggagtactcggcaa

SEQ ID NO: 944 - RNA, 14 nt, synthetic construct
  variation 1..14: note = Description of Sequence: ASO sequence
  misc_feature 1..14: note = Note: the sequence may be DNA or RNA
  source 1..14: mol_type = other RNA
gggagtactcggca

SEQ ID NO: 945 - RNA, 14 nt, synthetic construct
  variation 1..14: note = Description of Sequence: ASO sequence
  misc_feature 1..14: note = Note: the sequence may be DNA or RNA
  source 1..14: mol_type = other RNA
cgggagtactcggc

SEQ ID NO: 946 - RNA, 14 nt, synthetic construct
  variation 1..14: note = Description of Sequence: ASO sequence
  misc_feature 1..14: note = Note: the sequence may be DNA or RNA
  source 1..14: mol_type = other RNA
ccgggagtactcgg

SEQ ID NO: 947 - RNA, 14 nt, synthetic construct
  variation 1..14: note = Description of Sequence: ASO sequence
  misc_feature 1..14: note = Note: the sequence may be DNA or RNA
  source 1..14: mol_type = other RNA
gccgggagtactcg

SEQ ID NO: 948 - RNA, 14 nt, synthetic construct
  variation 1..14: note = Description of Sequence: ASO sequence
  misc_feature 1..14: note = Note: the sequence may be DNA or RNA
  source 1..14: mol_type = other RNA
tgccgggagtactc

SEQ ID NO: 949 - RNA, 14 nt, synthetic construct
  variation 1..14: note = Description of Sequence: ASO sequence
  misc_feature 1..14: note = Note: the sequence may be DNA or RNA
  source 1..14: mol_type = other RNA
ctgccgggagtact

SEQ ID NO: 950 - RNA, 14 nt, synthetic construct
  variation 1..14: note = Description of Sequence: ASO sequence
  misc_feature 1..14: note = Note: the sequence may be DNA or RNA
  source 1..14: mol_type = other RNA
actgccgggagtac

SEQ ID NO: 951 - RNA, 14 nt, synthetic construct
  variation 1..14: note = Description of Sequence: ASO sequence
  misc_feature 1..14: note = Note: the sequence may be DNA or RNA
  source 1..14: mol_type = other RNA
cactgccgggagta

SEQ ID NO: 952 - RNA, 14 nt, synthetic construct
  variation 1..14: note = Description of Sequence: ASO sequence
  misc_feature 1..14: note = Note: the sequence may be DNA or RNA
  source 1..14: mol_type = other RNA
gcactgccgggagt

SEQ ID NO: 953 - RNA, 14 nt, synthetic construct
  variation 1..14: note = Description of Sequence: ASO sequence
  misc_feature 1..14: note = Note: the sequence may be DNA or RNA
  source 1..14: mol_type = other RNA
tgcactgccgggag

SEQ ID NO: 954 - RNA, 14 nt, synthetic construct
  variation 1..14: note = Description of Sequence: ASO sequence
  misc_feature 1..14: note = Note: the sequence may be DNA or RNA
  source 1..14: mol_type = other RNA
gtgcactgccggga

SEQ ID NO: 955 - RNA, 14 nt, synthetic construct
  variation 1..14: note = Description of Sequence: ASO sequence
  misc_feature 1..14: note = Note: the sequence may be DNA or RNA
  source 1..14: mol_type = other RNA
ggtgcactgccggg

SEQ ID NO: 956 - RNA, 14 nt, synthetic construct
  variation 1..14: note = Description of Sequence: ASO sequence
  misc_feature 1..14: note = Note: the sequence may be DNA or RNA
  source 1..14: mol_type = other RNA
gggtgcactgccgg

SEQ ID NO: 957 - RNA, 14 nt, synthetic construct
  variation 1..14: note = Description of Sequence: ASO sequence
  misc_feature 1..14: note = Note: the sequence may be DNA or RNA
  source 1..14: mol_type = other RNA
tgggtgcactgccg

SEQ ID NO: 958 - RNA, 14 nt, synthetic construct
  variation 1..14: note = Description of Sequence: ASO sequence
  misc_feature 1..14: note = Note: the sequence may be DNA or RNA
  source 1..14: mol_type = other RNA
atgggtgcactgcc

SEQ ID NO: 959 - RNA, 14 nt, synthetic construct
  variation 1..14: note = Description of Sequence: ASO sequence
  misc_feature 1..14: note = Note: the sequence may be DNA or RNA
  source 1..14: mol_type = other RNA
catgggtgcactgc

SEQ ID NO: 960 - RNA, 14 nt, synthetic construct
  variation 1..14: note = Description of Sequence: ASO sequence
  misc_feature 1..14: note = Note: the sequence may be DNA or RNA
  source 1..14: mol_type = other RNA
gcatgggtgcactg

SEQ ID NO: 961 - RNA, 14 nt, synthetic construct
  variation 1..14: note = Description of Sequence: ASO sequence
  misc_feature 1..14: note = Note: the sequence may be DNA or RNA
  source 1..14: mol_type = other RNA
tgcatgggtgcact

SEQ ID NO: 962 - RNA, 14 nt, synthetic construct
  variation 1..14: note = Description of Sequence: ASO sequence
  misc_feature 1..14: note = Note: the sequence may be DNA or RNA
  source 1..14: mol_type = other RNA
ctgcatgggtgcac

SEQ ID NO: 963 - RNA, 14 nt, synthetic construct
  variation 1..14: note = Description of Sequence: ASO sequence
  misc_feature 1..14: note = Note: the sequence may be DNA or RNA
  source 1..14: mol_type = other RNA
cctgcatgggtgca

SEQ ID NO: 964 - RNA, 14 nt, synthetic construct
  variation 1..14: note = Description of Sequence: ASO sequence
  misc_feature 1..14: note = Note: the sequence may be DNA or RNA
  source 1..14: mol_type = other RNA
ccctgcatgggtgc

SEQ ID NO: 965 - RNA, 14 nt, synthetic construct
  variation 1..14: note = Description of Sequence: ASO sequence
  misc_feature 1..14: note = Note: the sequence may be DNA or RNA
  source 1..14: mol_type = other RNA
cccctgcatgggtg

SEQ ID NO: 966 - RNA, 14 nt, synthetic construct
  variation 1..14: note = Description of Sequence: ASO sequence
  misc_feature 1..14: note = Note: the sequence may be DNA or RNA
  source 1..14: mol_type = other RNA
ccccctgcatgggt

SEQ ID NO: 967 - RNA, 14 nt, synthetic construct
  variation 1..14: note = Description of Sequence: ASO sequence
  misc_feature 1..14: note = Note: the sequence may be DNA or RNA
  source 1..14: mol_type = other RNA
cccccctgcatggg

SEQ ID NO: 968 - RNA, 14 nt, synthetic construct
  variation 1..14: note = Description of Sequence: ASO sequence
  misc_feature 1..14: note = Note: the sequence may be DNA or RNA
  source 1..14: mol_type = other RNA
acccccctgcatgg

SEQ ID NO: 969 - RNA, 14 nt, synthetic construct
  variation 1..14: note = Description of Sequence: ASO sequence
  misc_feature 1..14: note = Note: the sequence may be DNA or RNA
  source 1..14: mol_type = other RNA
aacccccctgcatg

SEQ ID NO: 970 - RNA, 14 nt, synthetic construct
  variation 1..14: note = Description of Sequence: ASO sequence
  misc_feature 1..14: note = Note: the sequence may be DNA or RNA
  source 1..14: mol_type = other RNA
caacccccctgcat

SEQ ID NO: 971 - RNA, 14 nt, synthetic construct
  variation 1..14: note = Description of Sequence: ASO sequence
  misc_feature 1..14: note = Note: the sequence may be DNA or RNA
  source 1..14: mol_type = other RNA
gcaacccccctgca

SEQ ID NO: 972 - RNA, 14 nt, synthetic construct
  variation 1..14: note = Description of Sequence: ASO sequence
  misc_feature 1..14: note = Note: the sequence may be DNA or RNA
  source 1..14: mol_type = other RNA
ggcaacccccctgc

SEQ ID NO: 973 - RNA, 14 nt, synthetic construct
  variation 1..14: note = Description of Sequence: ASO sequence
  misc_feature 1..14: note = Note: the sequence may be DNA or RNA
  source 1..14: mol_type = other RNA
gggcaacccccctg

SEQ ID NO: 974 - RNA, 14 nt, synthetic construct
  variation 1..14: note = Description of Sequence: ASO sequence
  misc_feature 1..14: note = Note: the sequence may be DNA or RNA
  source 1..14: mol_type = other RNA
ggggcaacccccct

SEQ ID NO: 975 - RNA, 14 nt, synthetic construct
  variation 1..14: note = Description of Sequence: ASO sequence
  misc_feature 1..14: note = Note: the sequence may be DNA or RNA
  source 1..14: mol_type = other RNA
tggggcaacccccc

SEQ ID NO: 976 - RNA, 14 nt, synthetic construct
  variation 1..14: note = Description of Sequence: ASO sequence
  misc_feature 1..14: note = Note: the sequence may be DNA or RNA
  source 1..14: mol_type = other RNA
ctggggcaaccccc

SEQ ID NO: 977 - RNA, 14 nt, synthetic construct
  variation 1..14: note = Description of Sequence: ASO sequence
  misc_feature 1..14: note = Note: the sequence may be DNA or RNA
  source 1..14: mol_type = other RNA
cctggggcaacccc

SEQ ID NO: 978 - RNA, 14 nt, synthetic construct
  variation 1..14: note = Description of Sequence: ASO sequence
  misc_feature 1..14: note = Note: the sequence may be DNA or RNA
  source 1..14: mol_type = other RNA
tcctggggcaaccc

SEQ ID NO: 979 - RNA, 14 nt, synthetic construct
  variation 1..14: note = Description of Sequence: ASO sequence
  misc_feature 1..14: note = Note: the sequence may be DNA or RNA
  source 1..14: mol_type = other RNA
gtcctggggcaacc

SEQ ID NO: 980 - RNA, 14 nt, synthetic construct
  variation 1..14: note = Description of Sequence: ASO sequence
  misc_feature 1..14: note = Note: the sequence may be DNA or RNA
  source 1..14: mol_type = other RNA
agtcctggggcaac

SEQ ID NO: 981 - RNA, 14 nt, synthetic construct
  variation 1..14: note = Description of Sequence: ASO sequence
  misc_feature 1..14: note = Note: the sequence may be DNA or RNA
  source 1..14: mol_type = other RNA
cagtcctggggcaa

SEQ ID NO: 982 - RNA, 14 nt, synthetic construct
  variation 1..14: note = Description of Sequence: ASO sequence
  misc_feature 1..14: note = Note: the sequence may be DNA or RNA
  source 1..14: mol_type = other RNA
ccagtcctggggca

SEQ ID NO: 983 - RNA, 14 nt, synthetic construct
  variation 1..14: note = Description of Sequence: ASO sequence
  misc_feature 1..14: note = Note: the sequence may be DNA or RNA
  source 1..14: mol_type = other RNA
gccagtcctggggc

SEQ ID NO: 984 - RNA, 14 nt, synthetic construct
  variation 1..14: note = Description of Sequence: ASO sequence
  misc_feature 1..14: note = Note: the sequence may be DNA or RNA
  source 1..14: mol_type = other RNA
cgccagtcctgggg

SEQ ID NO: 985 - RNA, 14 nt, synthetic construct
  variation 1..14: note = Description of Sequence: ASO sequence
  misc_feature 1..14: note = Note: the sequence may be DNA or RNA
  source 1..14: mol_type = other RNA
ccgccagtcctggg

SEQ ID NO: 986 - RNA, 14 nt, synthetic construct
  variation 1..14: note = Description of Sequence: ASO sequence
  misc_feature 1..14: note = Note: the sequence may be DNA or RNA
  source 1..14: mol_type = other RNA
cccgccagtcctgg

SEQ ID NO: 987 - RNA, 14 nt, synthetic construct
  variation 1..14: note = Description of Sequence: ASO sequence
  misc_feature 1..14: note = Note: the sequence may be DNA or RNA
  source 1..14: mol_type = other RNA
ccccgccagtcctg

SEQ ID NO: 988 - RNA, 14 nt, synthetic construct
  variation 1..14: note = Description of Sequence: ASO sequence
  misc_feature 1..14: note = Note: the sequence may be DNA or RNA
  source 1..14: mol_type = other RNA
gccccgccagtcct

SEQ ID NO: 989 - RNA, 14 nt, synthetic construct
  variation 1..14: note = Description of Sequence: ASO sequence
  misc_feature 1..14: note = Note: the sequence may be DNA or RNA
  source 1..14: mol_type = other RNA
ggccccgccagtcc

SEQ ID NO: 990 - RNA, 14 nt, synthetic construct
  variation 1..14: note = Description of Sequence: ASO sequence
  misc_feature 1..14: note = Note: the sequence may be DNA or RNA
  source 1..14: mol_type = other RNA
gggccccgccagtc

SEQ ID NO: 991 - RNA, 14 nt, synthetic construct
  variation 1..14: note = Description of Sequence: ASO sequence
  misc_feature 1..14: note = Note: the sequence may be DNA or RNA
  source 1..14: mol_type = other RNA
agggccccgccagt

SEQ ID NO: 992 - RNA, 14 nt, synthetic construct
  variation 1..14: note = Description of Sequence: ASO sequence
  misc_feature 1..14: note = Note: the sequence may be DNA or RNA
  source 1..14: mol_type = other RNA
cagggccccgccag

SEQ ID NO: 993 - RNA, 14 nt, synthetic construct
  variation 1..14: note = Description of Sequence: ASO sequence
  misc_feature 1..14: note = Note: the sequence may be DNA or RNA
  source 1..14: mol_type = other RNA
tcagggccccgcca

SEQ ID NO: 994 - RNA, 14 nt, synthetic construct
  variation 1..14: note = Description of Sequence: ASO sequence
  misc_feature 1..14: note = Note: the sequence may be DNA or RNA
  source 1..14: mol_type = other RNA
gtcagggccccgcc

SEQ ID NO: 995 - RNA, 14 nt, synthetic construct
  variation 1..14: note = Description of Sequence: ASO sequence
  misc_feature 1..14: note = Note: the sequence may be DNA or RNA
  source 1..14: mol_type = other RNA
agtcagggccccgc

SEQ ID NO: 996 - RNA, 14 nt, synthetic construct
  variation 1..14: note = Description of Sequence: ASO sequence
  misc_feature 1..14: note = Note: the sequence may be DNA or RNA
  source 1..14: mol_type = other RNA
aagtcagggccccg

SEQ ID NO: 997 - RNA, 14 nt, synthetic construct
  variation 1..14: note = Description of Sequence: ASO sequence
  misc_feature 1..14: note = Note: the sequence may be DNA or RNA
  source 1..14: mol_type = other RNA
gaagtcagggcccc

SEQ ID NO: 998 - RNA, 14 nt, synthetic construct
  variation 1..14: note = Description of Sequence: ASO sequence
  misc_feature 1..14: note = Note: the sequence may be DNA or RNA
  source 1..14: mol_type = other RNA
agaagtcagggccc

SEQ ID NO: 999 - RNA, 14 nt, synthetic construct
  variation 1..14: note = Description of Sequence: ASO sequence
  misc_feature 1..14: note = Note: the sequence may be DNA or RNA
  source 1..14: mol_type = other RNA
cagaagtcagggcc

SEQ ID NO: 1000 - RNA, 14 nt, synthetic construct
  variation 1..14: note = Description of Sequence: ASO sequence
  misc_feature 1..14: note = Note: the sequence may be DNA or RNA
  source 1..14: mol_type = other RNA
gcagaagtcagggc

SEQ ID NO: 1001 - RNA, 14 nt, synthetic construct
  variation 1..14: note = Description of Sequence: ASO sequence
  misc_feature 1..14: note = Note: the sequence may be DNA or RNA
  source 1..14: mol_type = other RNA
ggcagaagtcaggg

SEQ ID NO: 1002 - RNA, 14 nt, synthetic construct
  variation 1..14: note = Description of Sequence: ASO sequence
  misc_feature 1..14: note = Note: the sequence may be DNA or RNA
  source 1..14: mol_type = other RNA
gtcaagcaccgtcc

SEQ ID NO: 1003 - RNA, 14 nt, synthetic construct
  variation 1..14: note = Description of Sequence: ASO sequence
  misc_feature 1..14: note = Note: the sequence may be DNA or RNA
  source 1..14: mol_type = other RNA
cgtcaagcaccgtc

SEQ ID NO: 1004 - RNA, 14 nt, synthetic construct
  variation 1..14: note = Description of Sequence: ASO sequence
  misc_feature 1..14: note = Note: the sequence may be DNA or RNA
  source 1..14: mol_type = other RNA
tcgtcaagcaccgt

SEQ ID NO: 1005 - RNA, 14 nt, synthetic construct
  variation 1..14: note = Description of Sequence: ASO sequence
  misc_feature 1..14: note = Note: the sequence may be DNA or RNA
  source 1..14: mol_type = other RNA
gtcgtcaagcaccg

SEQ ID NO: 1006 - RNA, 14 nt, synthetic construct
  variation 1..14: note = Description of Sequence: ASO sequence
  misc_feature 1..14: note = Note: the sequence may be DNA or RNA
  source 1..14: mol_type = other RNA
tgtcgtcaagcacc

SEQ ID NO: 1007 - RNA, 14 nt, synthetic construct
  variation 1..14: note = Description of Sequence: ASO sequence
  misc_feature 1..14: note = Note: the sequence may be DNA or RNA
  source 1..14: mol_type = other RNA
atgtcgtcaagcac

SEQ ID NO: 1008 - RNA, 14 nt, synthetic construct
  variation 1..14: note = Description of Sequence: ASO sequence
  misc_feature 1..14: note = Note: the sequence may be DNA or RNA
  source 1..14: mol_type = other RNA
gatgtcgtcaagca

SEQ ID NO: 1009 - RNA, 14 nt, synthetic construct
  variation 1..14: note = Description of Sequence: ASO sequence
  misc_feature 1..14: note = Note: the sequence may be DNA or RNA
  source 1..14: mol_type = other RNA
cgatgtcgtcaagc

SEQ ID NO: 1010 - RNA, 14 nt, synthetic construct
  variation 1..14: note = Description of Sequence: ASO sequence
  misc_feature 1..14: note = Note: the sequence may be DNA or RNA
  source 1..14: mol_type = other RNA
ccgatgtcgtcaag

SEQ ID NO: 1011 - RNA, 14 nt, synthetic construct
  variation 1..14: note = Description of Sequence: ASO sequence
  misc_feature 1..14: note = Note: the sequence may be DNA or RNA
  source 1..14: mol_type = other RNA
gccgatgtcgtcaa

SEQ ID NO: 1012 - RNA, 14 nt, synthetic construct
  variation 1..14: note = Description of Sequence: ASO sequence
  misc_feature 1..14: note = Note: the sequence may be DNA or RNA
  source 1..14: mol_type = other RNA
ggccgatgtcgtca

SEQ ID NO: 1013 - RNA, 14 nt, synthetic construct
  variation 1..14: note = Description of Sequence: ASO sequence
  misc_feature 1..14: note = Note: the sequence may be DNA or RNA
  source 1..14: mol_type = other RNA
tggccgatgtcgtc

SEQ ID NO: 1014 - RNA, 14 nt, synthetic construct
  variation 1..14: note = Description of Sequence: ASO sequence
  misc_feature 1..14: note = Note: the sequence may be DNA or RNA
  source 1..14: mol_type = other RNA
ctggccgatgtcgt

SEQ ID NO: 1015 - RNA, 14 nt, synthetic construct
  variation 1..14: note = Description of Sequence: ASO sequence
  misc_feature 1..14: note = Note: the sequence may be DNA or RNA
  source 1..14: mol_type = other RNA
tctggccgatgtcg

SEQ ID NO: 1016 - RNA, 14 nt, synthetic construct
  variation 1..14: note = Description of Sequence: ASO sequence
  misc_feature 1..14: note = Note: the sequence may be DNA or RNA
  source 1..14: mol_type = other RNA
gtctggccgatgtc

SEQ ID NO: 1017 - RNA, 14 nt, synthetic construct
  variation 1..14: note = Description of Sequence: ASO sequence
  misc_feature 1..14: note = Note: the sequence may be DNA or RNA
  source 1..14: mol_type = other RNA
ggtctggccgatgt

SEQ ID NO: 1018 - RNA, 14 nt, synthetic construct
  variation 1..14: note = Description of Sequence: ASO sequence
  misc_feature 1..14: note = Note: the sequence may be DNA or RNA
  source 1..14: mol_type = other RNA
cggtctggccgatg

SEQ ID NO: 1019 - RNA, 14 nt, synthetic construct
  variation 1..14: note = Description of Sequence: ASO sequence
  misc_feature 1..14: note = Note: the sequence may be DNA or RNA
  source 1..14: mol_type = other RNA
ccggtctggccgat

SEQ ID NO: 1020 - RNA, 14 nt, synthetic construct
  variation 1..14: note = Description of Sequence: ASO sequence
  misc_feature 1..14: note = Note: the sequence may be DNA or RNA
  source 1..14: mol_type = other RNA
gccggtctggccga

SEQ ID NO: 1021 - RNA, 14 nt, synthetic construct
  variation 1..14: note = Description of Sequence: ASO sequence
  misc_feature 1..14: note = Note: the sequence may be DNA or RNA
  source 1..14: mol_type = other RNA
agccggtctggccg

SEQ ID NO: 1022 - RNA, 14 nt, synthetic construct
  variation 1..14: note = Description of Sequence: ASO sequence
  misc_feature 1..14: note = Note: the sequence may be DNA or RNA
  source 1..14: mol_type = other RNA
cagccggtctggcc

SEQ ID NO: 1023 - RNA, 14 nt, synthetic construct
  variation 1..14: note = Description of Sequence: ASO sequence
  misc_feature 1..14: note = Note: the sequence may be DNA or RNA
  source 1..14: mol_type = other RNA
acagccggtctggc

SEQ ID NO: 1024 - RNA, 14 nt, synthetic construct
  variation 1..14: note = Description of Sequence: ASO sequence
  misc_feature 1..14: note = Note: the sequence may be DNA or RNA
  source 1..14: mol_type = other RNA
cacagccggtctgg

SEQ ID NO: 1025 - RNA, 14 nt, synthetic construct
  variation 1..14: note = Description of Sequence: ASO sequence
  misc_feature 1..14: note = Note: the sequence may be DNA or RNA
  source 1..14: mol_type = other RNA
acacagccggtctg

SEQ ID NO: 1026 - RNA, 14 nt, synthetic construct
  variation 1..14: note = Description of Sequence: ASO sequence
  misc_feature 1..14: note = Note: the sequence may be DNA or RNA
  source 1..14: mol_type = other RNA
gacacagccggtct

SEQ ID NO: 1027 - RNA, 14 nt, synthetic construct
  variation 1..14: note = Description of Sequence: ASO sequence
  misc_feature 1..14: note = Note: the sequence may be DNA or RNA
  source 1..14: mol_type = other RNA
ggacacagccggtc

SEQ ID NO: 1028 - RNA, 14 nt, synthetic construct
  variation 1..14: note = Description of Sequence: ASO sequence
  misc_feature 1..14: note = Note: the sequence may be DNA or RNA
  source 1..14: mol_type = other RNA
gggacacagccggt

SEQ ID NO: 1029 - RNA, 14 nt, synthetic construct
  variation 1..14: note = Description of Sequence: ASO sequence
  misc_feature 1..14: note = Note: the sequence may be DNA or RNA
  source 1..14: mol_type = other RNA
agggacacagccgg

SEQ ID NO: 1030 - RNA, 14 nt, synthetic construct
  variation 1..14: note = Description of Sequence: ASO sequence
  misc_feature 1..14: note = Note: the sequence may be DNA or RNA
  source 1..14: mol_type = other RNA
cagggacacagccg

SEQ ID NO: 1031 - RNA, 14 nt, synthetic construct
  variation 1..14: note = Description of Sequence: ASO sequence
  misc_feature 1..14: note = Note: the sequence may be DNA or RNA
  source 1..14: mol_type = other RNA
acagggacacagcc

SEQ ID NO: 1032 - RNA, 14 nt, synthetic construct
  variation 1..14: note = Description of Sequence: ASO sequence
  misc_feature 1..14: note = Note: the sequence may be DNA or RNA
  source 1..14: mol_type = other RNA
cacagggacacagc

SEQ ID NO: 1033 - RNA, 14 nt, synthetic construct
  variation 1..14: note = Description of Sequence: ASO sequence
  misc_feature 1..14: note = Note: the sequence may be DNA or RNA
  source 1..14: mol_type = other RNA
acacagggacacag

SEQ ID NO: 1034 - RNA, 14 nt, synthetic construct
  variation 1..14: note = Description of Sequence: ASO sequence
  misc_feature 1..14: note = Note: the sequence may be DNA or RNA
  source 1..14: mol_type = other RNA
gacacagggacaca

SEQ ID NO: 1035 - RNA, 14 nt, synthetic construct
  variation 1..14: note = Description of Sequence: ASO sequence
  misc_feature 1..14: note = Note: the sequence may be DNA or RNA
  source 1..14: mol_type = other RNA
tgacacagggacac

SEQ ID NO: 1036 - RNA, 14 nt, synthetic construct
  variation 1..14: note = Description of Sequence: ASO sequence
  misc_feature 1..14: note = Note: the sequence may be DNA or RNA
  source 1..14: mol_type = other RNA
ttgacacagggaca

SEQ ID NO: 1037 - RNA, 14 nt, synthetic construct
  variation 1..14: note = Description of Sequence: ASO sequence
  misc_feature 1..14: note = Note: the sequence may be DNA or RNA
  source 1..14: mol_type = other RNA
tttgacacagggac

SEQ ID NO: 1038 - RNA, 14 nt, synthetic construct
  variation 1..14: note = Description of Sequence: ASO sequence
  misc_feature 1..14: note = Note: the sequence may be DNA or RNA
  source 1..14: mol_type = other RNA
ctttgacacaggga

SEQ ID NO: 1039 - RNA, 14 nt, synthetic construct
  variation 1..14: note = Description of Sequence: ASO sequence
  misc_feature 1..14: note = Note: the sequence may be DNA or RNA
  source 1..14: mol_type = other RNA
actttgacacaggg

SEQ ID NO: 1040 - RNA, 14 nt, synthetic construct
  variation 1..14: note = Description of Sequence: ASO sequence
  misc_feature 1..14: note = Note: the sequence may be DNA or RNA
  source 1..14: mol_type = other RNA
cactttgacacagg

SEQ ID NO: 1041 - RNA, 14 nt, synthetic construct
  variation 1..14: note = Description of Sequence: ASO sequence
  misc_feature 1..14: note = Note: the sequence may be DNA or RNA
  source 1..14: mol_type = other RNA
acactttgacacag

SEQ ID NO: 1042 - RNA, 14 nt, synthetic construct
  variation 1..14: note = Description of Sequence: ASO sequence
  misc_feature 1..14: note = Note: the sequence may be DNA or RNA
  source 1..14: mol_type = other RNA
cacactttgacaca

SEQ ID NO: 1043 - RNA, 14 nt, synthetic construct
  variation 1..14: note = Description of Sequence: ASO sequence
  misc_feature 1..14: note = Note: the sequence may be DNA or RNA
  source 1..14: mol_type = other RNA
gcacactttgacac

SEQ ID NO: 1044 - RNA, 14 nt, synthetic construct
  variation 1..14: note = Description of Sequence: ASO sequence
  misc_feature 1..14: note = Note: the sequence may be DNA or RNA
  source 1..14: mol_type = other RNA
ggcacactttgaca

SEQ ID NO: 1045 - RNA, 14 nt, synthetic construct
  variation 1..14: note = Description of Sequence: ASO sequence
  misc_feature 1..14: note = Note: the sequence may be DNA or RNA
  source 1..14: mol_type = other RNA
aggcacactttgac

SEQ ID NO: 1046 - RNA, 14 nt, synthetic construct
  variation 1..14: note = Description of Sequence: ASO sequence
  misc_feature 1..14: note = Note: the sequence may be DNA or RNA
  source 1..14: mol_type = other RNA
caggcacactttga

SEQ ID NO: 1047 - RNA, 14 nt, synthetic construct
  variation 1..14: note = Description of Sequence: ASO sequence
  misc_feature 1..14: note = Note: the sequence may be DNA or RNA
  source 1..14: mol_type = other RNA
gcaggcacactttg

SEQ ID NO: 1048 - RNA, 14 nt, synthetic construct
  variation 1..14: note = Description of Sequence: ASO sequence
  misc_feature 1..14: note = Note: the sequence may be DNA or RNA
  source 1..14: mol_type = other RNA
cgcaggcacacttt

SEQ ID NO: 1049 - RNA, 14 nt, synthetic construct
  variation 1..14: note = Description of Sequence: ASO sequence
  misc_feature 1..14: note = Note: the sequence may be DNA or RNA
  source 1..14: mol_type = other RNA
acgcaggcacactt

SEQ ID NO: 1050 - RNA, 14 nt, synthetic construct
  variation 1..14: note = Description of Sequence: ASO sequence
  misc_feature 1..14: note = Note: the sequence may be DNA or RNA
  source 1..14: mol_type = other RNA
gacgcaggcacact

SEQ ID NO: 1051 - RNA, 14 nt, synthetic construct
  variation 1..14: note = Description of Sequence: ASO sequence
  misc_feature 1..14: note = Note: the sequence may be DNA or RNA
  source 1..14: mol_type = other RNA
agacgcaggcacac

SEQ ID NO: 1052 - RNA, 14 nt, synthetic construct
  variation 1..14: note = Description of Sequence: ASO sequence
  misc_feature 1..14: note = Note: the sequence may be DNA or RNA
  source 1..14: mol_type = other RNA
tagacgcaggcaca

SEQ ID NO: 1053 - RNA, 14 nt, synthetic construct
  variation 1..14: note = Description of Sequence: ASO sequence
  misc_feature 1..14: note = Note: the sequence may be DNA or RNA
  source 1..14: mol_type = other RNA
gtagacgcaggcac

SEQ ID NO: 1054 - RNA, 14 nt, synthetic construct
  variation 1..14: note = Description of Sequence: ASO sequence
  misc_feature 1..14: note = Note: the sequence may be DNA or RNA
  source 1..14: mol_type = other RNA
tgtagacgcaggca

SEQ ID NO: 1055 - RNA, 14 nt, synthetic construct
  variation 1..14: note = Description of Sequence: ASO sequence
  misc_feature 1..14: note = Note: the sequence may be DNA or RNA
  source 1..14: mol_type = other RNA
ttgtagacgcaggc

SEQ ID NO: 1056 - RNA, 14 nt, synthetic construct
  variation 1..14: note = Description of Sequence: ASO sequence
  misc_feature 1..14: note = Note: the sequence may be DNA or RNA
  source 1..14: mol_type = other RNA
gttgtagacgcagg

SEQ ID NO: 1057 - RNA, 14 nt, synthetic construct
  variation 1..14: note = Description of Sequence: ASO sequence
  misc_feature 1..14: note = Note: the sequence may be DNA or RNA
  source 1..14: mol_type = other RNA
cgttgtagacgcag

SEQ ID NO: 1058 - RNA, 14 nt, synthetic construct
  variation 1..14: note = Description of Sequence: ASO sequence
  misc_feature 1..14: note = Note: the sequence may be DNA or RNA
  source 1..14: mol_type = other RNA
ccgttgtagacgca

SEQ ID NO: 1059 - RNA, 14 nt, synthetic construct
  variation 1..14: note = Description of Sequence: ASO sequence
  misc_feature 1..14: note = Note: the sequence may be DNA or RNA
  source 1..14: mol_type = other RNA
cccgttgtagacgc

SEQ ID NO: 1060 - RNA, 14 nt, synthetic construct
  variation 1..14: note = Description of Sequence: ASO sequence
  misc_feature 1..14: note = Note: the sequence may be DNA or RNA
  source 1..14: mol_type = other RNA
ccccgttgtagacg

SEQ ID NO: 1061 - RNA, 14 nt, synthetic construct
  variation 1..14: note = Description of Sequence: ASO sequence
  misc_feature 1..14: note = Note: the sequence may be DNA or RNA
  source 1..14: mol_type = other RNA
gccccgttgtagac

SEQ ID NO: 1062 - RNA, 14 nt, synthetic construct
  variation 1..14: note = Description of Sequence: ASO sequence
  misc_feature 1..14: note = Note: the sequence may be DNA or RNA
  source 1..14: mol_type = other RNA
agccccgttgtaga

SEQ ID NO: 1063 - RNA, 14 nt, synthetic construct
  variation 1..14: note = Description of Sequence: ASO sequence
  misc_feature 1..14: note = Note: the sequence may be DNA or RNA
  source 1..14: mol_type = other RNA
cagccccgttgtag

SEQ ID NO: 1064 - RNA, 14 nt, synthetic construct
  variation 1..14: note = Description of Sequence: ASO sequence
  misc_feature 1..14: note = Note: the sequence may be DNA or RNA
  source 1..14: mol_type = other RNA
gcagccccgttgta

SEQ ID NO: 1065 - RNA, 14 nt, synthetic construct
  variation 1..14: note = Description of Sequence: ASO sequence
  misc_feature 1..14: note = Note: the sequence may be DNA or RNA
  source 1..14: mol_type = other RNA
ggcagccccgttgt

SEQ ID NO: 1066 - RNA, 14 nt, synthetic construct
  variation 1..14: note = Description of Sequence: ASO sequence
  misc_feature 1..14: note = Note: the sequence may be DNA or RNA
  source 1..14: mol_type = other RNA
aggcagccccgttg

SEQ ID NO: 1067 - RNA, 14 nt, synthetic construct
  variation 1..14: note = Description of Sequence: ASO sequence
  misc_feature 1..14: note = Note: the sequence may be DNA or RNA
  source 1..14: mol_type = other RNA
taggcagccccgtt

SEQ ID NO: 1068 - RNA, 14 nt, synthetic construct
  variation 1..14: note = Description of Sequence: ASO sequence
  misc_feature 1..14: note = Note: the sequence may be DNA or RNA
  source 1..14: mol_type = other RNA
ataggcagccccgt

SEQ ID NO: 1069 - RNA, 14 nt, synthetic construct
  variation 1..14: note = Description of Sequence: ASO sequence
  misc_feature 1..14: note = Note: the sequence may be DNA or RNA
  source 1..14: mol_type = other RNA
cataggcagccccg

SEQ ID NO: 1070 - RNA, 14 nt, synthetic construct
  variation 1..14: note = Description of Sequence: ASO sequence
  misc_feature 1..14: note = Note: the sequence may be DNA or RNA
  source 1..14: mol_type = other RNA
gcataggcagcccc

SEQ ID NO: 1071 - RNA, 14 nt, synthetic construct
  variation 1..14: note = Description of Sequence: ASO sequence
  misc_feature 1..14: note = Note: the sequence may be DNA or RNA
  source 1..14: mol_type = other RNA
ggcataggcagccc

SEQ ID NO: 1072 - RNA, 14 nt, synthetic construct
  variation 1..14: note = Description of Sequence: ASO sequence
  misc_feature 1..14: note = Note: the sequence may be DNA or RNA
  source 1..14: mol_type = other RNA
gggcataggcagcc

SEQ ID NO: 1073 - RNA, 14 nt, synthetic construct
  variation 1..14: note = Description of Sequence: ASO sequence
  misc_feature 1..14: note = Note: the sequence may be DNA or RNA
  source 1..14: mol_type = other RNA
ggggcataggcagc

SEQ ID NO: 1074 - RNA, 14 nt, synthetic construct
  variation 1..14: note = Description of Sequence: ASO sequence
  misc_feature 1..14: note = Note: the sequence may be DNA or RNA
  source 1..14: mol_type = other RNA
tggggcataggcag

SEQ ID NO: 1075 - RNA, 14 nt, synthetic construct
  variation 1..14: note = Description of Sequence: ASO sequence
  misc_feature 1..14: note = Note: the sequence may be DNA or RNA
  source 1..14: mol_type = other RNA
ctggggcataggca

SEQ ID NO: 1076 - RNA, 14 nt, synthetic construct
  variation 1..14: note = Description of Sequence: ASO sequence
  misc_feature 1..14: note = Note: the sequence may be DNA or RNA
  source 1..14: mol_type = other RNA
cctggggcataggc

SEQ ID NO: 1077 - RNA, 14 nt, synthetic construct
  variation 1..14: note = Description of Sequence: ASO sequence
  misc_feature 1..14: note = Note: the sequence may be DNA or RNA
  source 1..14: mol_type = other RNA
ccctggggcatagg

SEQ ID NO: 1078 - RNA, 14 nt, synthetic construct
  variation 1..14: note = Description of Sequence: ASO sequence
  misc_feature 1..14: note = Note: the sequence may be DNA or RNA
  source 1..14: mol_type = other RNA
cccctggggcatag

SEQ ID NO: 1079 - RNA, 14 nt, synthetic construct
  variation 1..14: note = Description of Sequence: ASO sequence
  misc_feature 1..14: note = Note: the sequence may be DNA or RNA
  source 1..14: mol_type = other RNA
gcccctggggcata

SEQ ID NO: 1080 - RNA, 14 nt, synthetic construct
  variation 1..14: note = Description of Sequence: ASO sequence
  misc_feature 1..14: note = Note: the sequence may be DNA or RNA
  source 1..14: mol_type = other RNA
ggcccctggggcat

SEQ ID NO: 1081 - RNA, 14 nt, synthetic construct
  variation 1..14: note = Description of Sequence: ASO sequence
  misc_feature 1..14: note = Note: the sequence may be DNA or RNA
  source 1..14: mol_type = other RNA
tggcccctggggca

SEQ ID NO: 1082 - RNA, 14 nt, synthetic construct
  variation 1..14: note = Description of Sequence: ASO sequence
  misc_feature 1..14: note = Note: the sequence may be DNA or RNA
  source 1..14: mol_type = other RNA
gtggcccctggggc

SEQ ID NO: 1083 - RNA, 14 nt, synthetic construct
  variation 1..14: note = Description of Sequence: ASO sequence
  misc_feature 1..14: note = Note: the sequence may be DNA or RNA
  source 1..14: mol_type = other RNA
ggtggcccctgggg

SEQ ID NO: 1084 - RNA, 14 nt, synthetic construct
  variation 1..14: note = Description of Sequence: ASO sequence
  misc_feature 1..14: note = Note: the sequence may be DNA or RNA
  source 1..14: mol_type = other RNA
aggtggcccctggg

SEQ ID NO: 1085 - RNA, 14 nt, synthetic construct
  variation 1..14: note = Description of Sequence: ASO sequence
  misc_feature 1..14: note = Note: the sequence may be DNA or RNA
  source 1..14: mol_type = other RNA
taggtggcccctgg

SEQ ID NO: 1086 - RNA, 14 nt, synthetic construct
  variation 1..14: note = Description of Sequence: ASO sequence
  misc_feature 1..14: note = Note: the sequence may be DNA or RNA
  source 1..14: mol_type = other RNA
gtaggtggcccctg

SEQ ID NO: 1087 - RNA, 14 nt, synthetic construct
  variation 1..14: note = Description of Sequence: ASO sequence
  misc_feature 1..14: note = Note: the sequence may be DNA or RNA
  source 1..14: mol_type = other RNA
agtaggtggcccct

SEQ ID NO: 1088 - RNA, 14 nt, synthetic construct
  variation 1..14: note = Description of Sequence: ASO sequence
  misc_feature 1..14: note = Note: the sequence may be DNA or RNA
  source 1..14: mol_type = other RNA
gagtaggtggcccc

SEQ ID NO: 1089 - RNA, 14 nt, synthetic construct
  variation 1..14: note = Description of Sequence: ASO sequence
  misc_feature 1..14: note = Note: the sequence may be DNA or RNA
  source 1..14: mol_type = other RNA
ggagtaggtggccc

SEQ ID NO: 1090 - RNA, 14 nt, synthetic construct
  variation 1..14: note = Description of Sequence: ASO sequence
  misc_feature 1..14: note = Note: the sequence may be DNA or RNA
  source 1..14: mol_type = other RNA
tggagtaggtggcc

SEQ ID NO: 1091 - RNA, 14 nt, synthetic construct
  variation 1..14: note = Description of Sequence: ASO sequence
  misc_feature 1..14: note = Note: the sequence may be DNA or RNA
  source 1..14: mol_type = other RNA
gtggagtaggtggc

SEQ ID NO: 1092 - RNA, 14 nt, synthetic construct
  variation 1..14: note = Description of Sequence: ASO sequence
  misc_feature 1..14: note = Note: the sequence may be DNA or RNA
  source 1..14: mol_type = other RNA
tgtggagtaggtgg

SEQ ID NO: 1093 - RNA, 14 nt, synthetic construct
  variation 1..14: note = Description of Sequence: ASO sequence
  misc_feature 1..14: note = Note: the sequence may be DNA or RNA
  source 1..14: mol_type = other RNA
ctgtggagtaggtg

SEQ ID NO: 1094 - RNA, 14 nt, synthetic construct
  variation 1..14: note = Description of Sequence: ASO sequence
  misc_feature 1..14: note = Note: the sequence may be DNA or RNA
  source 1..14: mol_type = other RNA
tctgtggagtaggt

SEQ ID NO: 1095 - RNA, 14 nt, synthetic construct
  variation 1..14: note = Description of Sequence: ASO sequence
  misc_feature 1..14: note = Note: the sequence may be DNA or RNA
  source 1..14: mol_type = other RNA
gtctgtggagtagg

SEQ ID NO: 1096 - RNA, 14 nt, synthetic construct
  variation 1..14: note = Description of Sequence: ASO sequence
  misc_feature 1..14: note = Note: the sequence may be DNA or RNA
  source 1..14: mol_type = other RNA
agtctgtggagtag

SEQ ID NO: 1097 - RNA, 14 nt, synthetic construct
  variation 1..14: note = Description of Sequence: ASO sequence
  misc_feature 1..14: note = Note: the sequence may be DNA or RNA
  source 1..14: mol_type = other RNA
cagtctgtggagta

SEQ ID NO: 1098 - RNA, 14 nt, synthetic construct
  variation 1..14: note = Description of Sequence: ASO sequence
  misc_feature 1..14: note = Note: the sequence may be DNA or RNA
  source 1..14: mol_type = other RNA
gcagtctgtggagt

SEQ ID NO: 1099 - RNA, 14 nt, synthetic construct
  variation 1..14: note = Description of Sequence: ASO sequence
  misc_feature 1..14: note = Note: the sequence may be DNA or RNA
  source 1..14: mol_type = other RNA
tgcagtctgtggag

SEQ ID NO: 1100 - RNA, 14 nt, synthetic construct
  variation 1..14: note = Description of Sequence: ASO sequence
  misc_feature 1..14: note = Note: the sequence may be DNA or RNA
  source 1..14: mol_type = other RNA
gtgcagtctgtgga

SEQ ID NO: 1101 - RNA, 14 nt, synthetic construct
  variation 1..14: note = Description of Sequence: ASO sequence
  misc_feature 1..14: note = Note: the sequence may be DNA or RNA
  source 1..14: mol_type = other RNA
ggtgcagtctgtgg

SEQ ID NO: 1102 - RNA, 14 nt, synthetic construct
  variation 1..14: note = Description of Sequence: ASO sequence
  misc_feature 1..14: note = Note: the sequence may be DNA or RNA
  source 1..14: mol_type = other RNA
tggtgcagtctgtg

SEQ ID NO: 1103 - RNA, 14 nt, synthetic construct
  variation 1..14: note = Description of Sequence: ASO sequence
  misc_feature 1..14: note = Note: the sequence may be DNA or RNA
  source 1..14: mol_type = other RNA
ttggtgcagtctgt

SEQ ID NO: 1104 - RNA, 14 nt, synthetic construct
  variation 1..14: note = Description of Sequence: ASO sequence
  misc_feature 1..14: note = Note: the sequence may be DNA or RNA
  source 1..14: mol_type = other RNA
gttggtgcagtctg

SEQ ID NO: 1105 - RNA, 14 nt, synthetic construct
  variation 1..14: note = Description of Sequence: ASO sequence
  misc_feature 1..14: note = Note: the sequence may be DNA or RNA
  source 1..14: mol_type = other RNA
agttggtgcagtct

SEQ ID NO: 1106 - RNA, 14 nt, synthetic construct
  variation 1..14: note = Description of Sequence: ASO sequence
  misc_feature 1..14: note = Note: the sequence may be DNA or RNA
  source 1..14: mol_type = other RNA
cagttggtgcagtc

SEQ ID NO: 1107 - RNA, 14 nt, synthetic construct
  variation 1..14: note = Description of Sequence: ASO sequence
  misc_feature 1..14: note = Note: the sequence may be DNA or RNA
  source 1..14: mol_type = other RNA
ctccggagcaggtg

SEQ ID NO: 1108 - RNA, 14 nt, synthetic construct
  variation 1..14: note = Description of Sequence: ASO sequence
  misc_feature 1..14: note = Note: the sequence may be DNA or RNA
  source 1..14: mol_type = other RNA
cctccggagcaggt

SEQ ID NO: 1109 - RNA, 14 nt, synthetic construct
  variation 1..14: note = Description of Sequence: ASO sequence
  misc_feature 1..14: note = Note: the sequence may be DNA or RNA
  source 1..14: mol_type = other RNA
gcctccggagcagg

SEQ ID NO: 1110 - RNA, 14 nt, synthetic construct
  variation 1..14: note = Description of Sequence: ASO sequence
  misc_feature 1..14: note = Note: the sequence may be DNA or RNA
  source 1..14: mol_type = other RNA
ggcctccggagcag

SEQ ID NO: 1111 - RNA, 14 nt, synthetic construct
  variation 1..14: note = Description of Sequence: ASO sequence
  misc_feature 1..14: note = Note: the sequence may be DNA or RNA
  source 1..14: mol_type = other RNA
cggcctccggagca

SEQ ID NO: 1112 - RNA, 14 nt, synthetic construct
  variation 1..14: note = Description of Sequence: ASO sequence
  misc_feature 1..14: note = Note: the sequence may be DNA or RNA
  source 1..14: mol_type = other RNA
ccggcctccggagc

SEQ ID NO: 1113 - RNA, 14 nt, synthetic construct
  variation 1..14: note = Description of Sequence: ASO sequence
  misc_feature 1..14: note = Note: the sequence may be DNA or RNA
  source 1..14: mol_type = other RNA
accggcctccggag

SEQ ID NO: 1114 - RNA, 14 nt, synthetic construct
  variation 1..14: note = Description of Sequence: ASO sequence
  misc_feature 1..14: note = Note: the sequence may be DNA or RNA
  source 1..14: mol_type = other RNA
caccggcctccgga

SEQ ID NO: 1115 - RNA, 14 nt, synthetic construct
  variation 1..14: note = Description of Sequence: ASO sequence
  misc_feature 1..14: note = Note: the sequence may be DNA or RNA
  source 1..14: mol_type = other RNA
ccaccggcctccgg

SEQ ID NO: 1116 - RNA, 14 nt, synthetic construct
  variation 1..14: note = Description of Sequence: ASO sequence
  misc_feature 1..14: note = Note: the sequence may be DNA or RNA
  source 1..14: mol_type = other RNA
tccaccggcctccg

SEQ ID NO: 1117 - RNA, 14 nt, synthetic construct
  variation 1..14: note = Description of Sequence: ASO sequence
  misc_feature 1..14: note = Note: the sequence may be DNA or RNA
  source 1..14: mol_type = other RNA
ctccaccggcctcc

SEQ ID NO: 1118 - RNA, 14 nt, synthetic construct
  variation 1..14: note = Description of Sequence: ASO sequence
  misc_feature 1..14: note = Note: the sequence may be DNA or RNA
  source 1..14: mol_type = other RNA
gctccaccggcctc

SEQ ID NO: 1119 - RNA, 14 nt, synthetic construct
  variation 1..14: note = Description of Sequence: ASO sequence
  misc_feature 1..14: note = Note: the sequence may be DNA or RNA
  source 1..14: mol_type = other RNA
agctccaccggcct

SEQ ID NO: 1120 - RNA, 14 nt, synthetic construct
  variation 1..14: note = Description of Sequence: ASO sequence
  misc_feature 1..14: note = Note: the sequence may be DNA or RNA
  source 1..14: mol_type = other RNA
cagctccaccggcc

SEQ ID NO: 1121 - RNA, 14 nt, synthetic construct
  variation 1..14: note = Description of Sequence: ASO sequence
  misc_feature 1..14: note = Note: the sequence may be DNA or RNA
  source 1..14: mol_type = other RNA
gcagctccaccggc

SEQ ID NO: 1122 - RNA, 14 nt, synthetic construct
  variation 1..14: note = Description of Sequence: ASO sequence
  misc_feature 1..14: note = Note: the sequence may be DNA or RNA
  source 1..14: mol_type = other RNA
ggcagctccaccgg

SEQ ID NO: 1123 - RNA, 14 nt, synthetic construct
  variation 1..14: note = Description of Sequence: ASO sequence
  misc_feature 1..14: note = Note: the sequence may be DNA or RNA
  source 1..14: mol_type = other RNA
tggcagctccaccg

SEQ ID NO: 1124 - RNA, 14 nt, synthetic construct
  variation 1..14: note = Description of Sequence: ASO sequence
  misc_feature 1..14: note = Note: the sequence may be DNA or RNA
  source 1..14: mol_type = other RNA
ctggcagctccacc

SEQ ID NO: 1125 - RNA, 14 nt, synthetic construct
  variation 1..14: note = Description of Sequence: ASO sequence
  misc_feature 1..14: note = Note: the sequence may be DNA or RNA
  source 1..14: mol_type = other RNA
cctggcagctccac

SEQ ID NO: 1126 - RNA, 14 nt, synthetic construct
  variation 1..14: note = Description of Sequence: ASO sequence
  misc_feature 1..14: note = Note: the sequence may be DNA or RNA
  source 1..14: mol_type = other RNA
tcctggcagctcca

SEQ ID NO: 1127 - RNA, 14 nt, synthetic construct
  variation 1..14: note = Description of Sequence: ASO sequence
  misc_feature 1..14: note = Note: the sequence may be DNA or RNA
  source 1..14: mol_type = other RNA
ctcctggcagctcc

SEQ ID NO: 1128 - RNA, 14 nt, synthetic construct
  variation 1..14: note = Description of Sequence: ASO sequence
  misc_feature 1..14: note = Note: the sequence may be DNA or RNA
  source 1..14: mol_type = other RNA
cctcctggcagctc

SEQ ID NO: 1129 - RNA, 14 nt, synthetic construct
  variation 1..14: note = Description of Sequence: ASO sequence
  misc_feature 1..14: note = Note: the sequence may be DNA or RNA
  source 1..14: mol_type = other RNA
acctcctggcagct

SEQ ID NO: 1130 - RNA, 14 nt, synthetic construct
  variation 1..14: note = Description of Sequence: ASO sequence
  misc_feature 1..14: note = Note: the sequence may be DNA or RNA
  source 1..14: mol_type = other RNA
aacctcctggcagc

SEQ ID NO: 1131 - RNA, 14 nt, synthetic construct
  variation 1..14: note = Description of Sequence: ASO sequence
  misc_feature 1..14: note = Note: the sequence may be DNA or RNA
  source 1..14: mol_type = other RNA
gaacctcctggcag

SEQ ID NO: 1132 - RNA, 14 nt, synthetic construct
  variation 1..14: note = Description of Sequence: ASO sequence
  misc_feature 1..14: note = Note: the sequence may be DNA or RNA
  source 1..14: mol_type = other RNA
ggaacctcctggca

SEQ ID NO: 1133 - RNA, 14 nt, synthetic construct
  variation 1..14: note = Description of Sequence: ASO sequence
  misc_feature 1..14: note = Note: the sequence may be DNA or RNA
  source 1..14: mol_type = other RNA
tggaacctcctggc

SEQ ID NO: 1134 - RNA, 14 nt, synthetic construct
  variation 1..14: note = Description of Sequence: ASO sequence
  misc_feature 1..14: note = Note: the sequence may be DNA or RNA
  source 1..14: mol_type = other RNA
atggaacctcctgg

SEQ ID NO: 1135 - RNA, 14 nt, synthetic construct
  variation 1..14: note = Description of Sequence: ASO sequence
  misc_feature 1..14: note = Note: the sequence may be DNA or RNA
  source 1..14: mol_type = other RNA
catggaacctcctg

SEQ ID NO: 1136 - RNA, 14 nt, synthetic construct
  variation 1..14: note = Description of Sequence: ASO sequence
  misc_feature 1..14: note = Note: the sequence may be DNA or RNA
  source 1..14: mol_type = other RNA
gcatggaacctcct

SEQ ID NO: 1137 - RNA, 14 nt, synthetic construct
  variation 1..14: note = Description of Sequence: ASO sequence
  misc_feature 1..14: note = Note: the sequence may be DNA or RNA
  source 1..14: mol_type = other RNA
ggcatggaacctcc

SEQ ID NO: 1138 - RNA, 14 nt, synthetic construct
  variation 1..14: note = Description of Sequence: ASO sequence
  misc_feature 1..14: note = Note: the sequence may be DNA or RNA
  source 1..14: mol_type = other RNA
gggcatggaacctc

SEQ ID NO: 1139 - RNA, 14 nt, synthetic construct
  variation 1..14: note = Description of Sequence: ASO sequence
  misc_feature 1..14: note = Note: the sequence may be DNA or RNA
  source 1..14: mol_type = other RNA
cgggcatggaacct

SEQ ID NO: 1140 - RNA, 14 nt, synthetic construct
  variation 1..14: note = Description of Sequence: ASO sequence
  misc_feature 1..14: note = Note: the sequence may be DNA or RNA
  source 1..14: mol_type = other RNA
ccgggcatggaacc

SEQ ID NO: 1141 - RNA, 14 nt, synthetic construct
  variation 1..14: note = Description of Sequence: ASO sequence
  misc_feature 1..14: note = Note: the sequence may be DNA or RNA
  source 1..14: mol_type = other RNA
cccgggcatggaac

SEQ ID NO: 1142 - RNA, 14 nt, synthetic construct
  variation 1..14: note = Description of Sequence: ASO sequence
  misc_feature 1..14: note = Note: the sequence may be DNA or RNA
  source 1..14: mol_type = other RNA
acccgggcatggaa

SEQ ID NO: 1143 - RNA, 14 nt, synthetic construct
  variation 1..14: note = Description of Sequence: ASO sequence
  misc_feature 1..14: note = Note: the sequence may be DNA or RNA
  source 1..14: mol_type = other RNA
tacccgggcatgga

SEQ ID NO: 1144 - RNA, 14 nt, synthetic construct
  variation 1..14: note = Description of Sequence: ASO sequence
  misc_feature 1..14: note = Note: the sequence may be DNA or RNA
  source 1..14: mol_type = other RNA
gtacccgggcatgg

SEQ ID NO: 1145 - RNA, 14 nt, synthetic construct
  variation 1..14: note = Description of Sequence: ASO sequence
  misc_feature 1..14: note = Note: the sequence may be DNA or RNA
  source 1..14: mol_type = other RNA
ggtacccgggcatg

SEQ ID NO: 1146 - RNA, 14 nt, synthetic construct
  variation 1..14: note = Description of Sequence: ASO sequence
  misc_feature 1..14: note = Note: the sequence may be DNA or RNA
  source 1..14: mol_type = other RNA
aggtacccgggcat

SEQ ID NO: 1147 - RNA, 14 nt, synthetic construct
  variation 1..14: note = Description of Sequence: ASO sequence
  misc_feature 1..14: note = Note: the sequence may be DNA or RNA
  source 1..14: mol_type = other RNA
caggtacccgggca

SEQ ID NO: 1148 - RNA, 14 nt, synthetic construct
  variation 1..14: note = Description of Sequence: ASO sequence
  misc_feature 1..14: note = Note: the sequence may be DNA or RNA
  source 1..14: mol_type = other RNA
gcaggtacccgggc

SEQ ID NO: 1149 - RNA, 14 nt, synthetic construct
  variation 1..14: note = Description of Sequence: ASO sequence
  misc_feature 1..14: note = Note: the sequence may be DNA or RNA
  source 1..14: mol_type = other RNA
agcaggtacccggg

SEQ ID NO: 1150 - RNA, 14 nt, synthetic construct
  variation 1..14: note = Description of Sequence: ASO sequence
  misc_feature 1..14: note = Note: the sequence may be DNA or RNA
  source 1..14: mol_type = other RNA
gagcaggtacccgg

SEQ ID NO: 1151 - RNA, 14 nt, synthetic construct
  variation 1..14: note = Description of Sequence: ASO sequence
  misc_feature 1..14: note = Note: the sequence may be DNA or RNA
  source 1..14: mol_type = other RNA
agagcaggtacccg

SEQ ID NO: 1152 - RNA, 14 nt, synthetic construct
  variation 1..14: note = Description of Sequence: ASO sequence
  misc_feature 1..14: note = Note: the sequence may be DNA or RNA
  source 1..14: mol_type = other RNA
cagagcaggtaccc

SEQ ID NO: 1153 - RNA, 14 nt, synthetic construct
  variation 1..14: note = Description of Sequence: ASO sequence
  misc_feature 1..14: note = Note: the sequence may be DNA or RNA
  source 1..14: mol_type = other RNA
acagagcaggtacc

SEQ ID NO: 1154 - RNA, 14 nt, synthetic construct
  variation 1..14: note = Description of Sequence: ASO sequence
  misc_feature 1..14: note = Note: the sequence may be DNA or RNA
  source 1..14: mol_type = other RNA
cacagagcaggtac

SEQ ID NO: 1155 - RNA, 14 nt, synthetic construct
  variation 1..14: note = Description of Sequence: ASO sequence
  misc_feature 1..14: note = Note: the sequence may be DNA or RNA
  source 1..14: mol_type = other RNA
gcacagagcaggta

SEQ ID NO: 1156 - RNA, 14 nt, synthetic construct
  variation 1..14: note = Description of Sequence: ASO sequence
  misc_feature 1..14: note = Note: the sequence may be DNA or RNA
  source 1..14: mol_type = other RNA
agcacagagcaggt

SEQ ID NO: 1157 - RNA, 14 nt, synthetic construct
  variation 1..14: note = Description of Sequence: ASO sequence
  misc_feature 1..14: note = Note: the sequence may be DNA or RNA
  source 1..14: mol_type = other RNA
aagcacagagcagg

SEQ ID NO: 1158 - RNA, 14 nt, synthetic construct
  variation 1..14: note = Description of Sequence: ASO sequence
  misc_feature 1..14: note = Note: the sequence may be DNA or RNA
  source 1..14: mol_type = other RNA
caagcacagagcag

SEQ ID NO: 1159 - RNA, 14 nt, synthetic construct
  variation 1..14: note = Description of Sequence: ASO sequence
  misc_feature 1..14: note = Note: the sequence may be DNA or RNA
  source 1..14: mol_type = other RNA
ccaagcacagagca

SEQ ID NO: 1160 - RNA, 14 nt, synthetic construct
  variation 1..14: note = Description of Sequence: ASO sequence
  misc_feature 1..14: note = Note: the sequence may be DNA or RNA
  source 1..14: mol_type = other RNA
tccaagcacagagc

SEQ ID NO: 1161 - RNA, 14 nt, synthetic construct
  variation 1..14: note = Description of Sequence: ASO sequence
  misc_feature 1..14: note = Note: the sequence may be DNA or RNA
  source 1..14: mol_type = other RNA
ctccaagcacagag

SEQ ID NO: 1162 - RNA, 14 nt, synthetic construct
  variation 1..14: note = Description of Sequence: ASO sequence
  misc_feature 1..14: note = Note: the sequence may be DNA or RNA
  source 1..14: mol_type = other RNA
cctccaagcacaga

SEQ ID NO: 1163 - RNA, 14 nt, synthetic construct
  variation 1..14: note = Description of Sequence: ASO sequence
  misc_feature 1..14: note = Note: the sequence may be DNA or RNA
  source 1..14: mol_type = other RNA
acctccaagcacag

SEQ ID NO: 1164 - RNA, 14 nt, synthetic construct
  variation 1..14: note = Description of Sequence: ASO sequence
  misc_feature 1..14: note = Note: the sequence may be DNA or RNA
  source 1..14: mol_type = other RNA
cacctccaagcaca

SEQ ID NO: 1165 - RNA, 14 nt, synthetic construct
  variation 1..14: note = Description of Sequence: ASO sequence
  misc_feature 1..14: note = Note: the sequence may be DNA or RNA
  source 1..14: mol_type = other RNA
gcacctccaagcac

SEQ ID NO: 1166 - RNA, 14 nt, synthetic construct
  variation 1..14: note = Description of Sequence: ASO sequence
  misc_feature 1..14: note = Note: the sequence may be DNA or RNA
  source 1..14: mol_type = other RNA
ggcacctccaagca

SEQ ID NO: 1167 - RNA, 14 nt, synthetic construct
  variation 1..14: note = Description of Sequence: ASO sequence
  misc_feature 1..14: note = Note: the sequence may be DNA or RNA
  source 1..14: mol_type = other RNA
gggcacctccaagc

SEQ ID NO: 1168 - RNA, 14 nt, synthetic construct
  variation 1..14: note = Description of Sequence: ASO sequence
  misc_feature 1..14: note = Note: the sequence may be DNA or RNA
  source 1..14: mol_type = other RNA
tgggcacctccaag

SEQ ID NO: 1169 - RNA, 14 nt, synthetic construct
  variation 1..14: note = Description of Sequence: ASO sequence
  misc_feature 1..14: note = Note: the sequence may be DNA or RNA
  source 1..14: mol_type = other RNA
gtgggcacctccaa

SEQ ID NO: 1170 - RNA, 14 nt, synthetic construct
  variation 1..14: note = Description of Sequence: ASO sequence
  misc_feature 1..14: note = Note: the sequence may be DNA or RNA
  source 1..14: mol_type = other RNA
agtgggcacctcca

SEQ ID NO: 1171 - RNA, 14 nt, synthetic construct
  variation 1..14: note = Description of Sequence: ASO sequence
  misc_feature 1..14: note = Note: the sequence may be DNA or RNA
  source 1..14: mol_type = other RNA
aagtgggcacctcc

SEQ ID NO: 1172 - RNA, 14 nt, synthetic construct
  variation 1..14: note = Description of Sequence: ASO sequence
  misc_feature 1..14: note = Note: the sequence may be DNA or RNA
  source 1..14: mol_type = other RNA
gaagtgggcacctc

SEQ ID NO: 1173 - RNA, 14 nt, synthetic construct
  variation 1..14: note = Description of Sequence: ASO sequence
  misc_feature 1..14: note = Note: the sequence may be DNA or RNA
  source 1..14: mol_type = other RNA
agaagtgggcacct

SEQ ID NO: 1174 - RNA, 14 nt, synthetic construct
  variation 1..14: note = Description of Sequence: ASO sequence
  misc_feature 1..14: note = Note: the sequence may be DNA or RNA
  source 1..14: mol_type = other RNA
gagaagtgggcacc

SEQ ID NO: 1175 - RNA, 14 nt, synthetic construct
  variation 1..14: note = Description of Sequence: ASO sequence
  misc_feature 1..14: note = Note: the sequence may be DNA or RNA
  source 1..14: mol_type = other RNA
tgagaagtgggcac

SEQ ID NO: 1176 - RNA, 14 nt, synthetic construct
  variation 1..14: note = Description of Sequence: ASO sequence
  misc_feature 1..14: note = Note: the sequence may be DNA or RNA
  source 1..14: mol_type = other RNA
ttgagaagtgggca

SEQ ID NO: 1177 - RNA, 14 nt, synthetic construct
  variation 1..14: note = Description of Sequence: ASO sequence
  misc_feature 1..14: note = Note: the sequence may be DNA or RNA
  source 1..14: mol_type = other RNA
gttgagaagtgggc

SEQ ID NO: 1178 - RNA, 14 nt, synthetic construct
  variation 1..14: note = Description of Sequence: ASO sequence
  misc_feature 1..14: note = Note: the sequence may be DNA or RNA
  source 1..14: mol_type = other RNA
cgttgagaagtggg

SEQ ID NO: 1179 - RNA, 14 nt, synthetic construct
  variation 1..14: note = Description of Sequence: ASO sequence
  misc_feature 1..14: note = Note: the sequence may be DNA or RNA
  source 1..14: mol_type = other RNA
acgttgagaagtgg

SEQ ID NO: 1180 - RNA, 14 nt, synthetic construct
  variation 1..14: note = Description of Sequence: ASO sequence
  misc_feature 1..14: note = Note: the sequence may be DNA or RNA
  source 1..14: mol_type = other RNA
aacgttgagaagtg

SEQ ID NO: 1181 - RNA, 14 nt, synthetic construct
  variation 1..14: note = Description of Sequence: ASO sequence
  misc_feature 1..14: note = Note: the sequence may be DNA or RNA
  source 1..14: mol_type = other RNA
aaacgttgagaagt

SEQ ID NO: 1182 - RNA, 14 nt, synthetic construct
  variation 1..14: note = Description of Sequence: ASO sequence
  misc_feature 1..14: note = Note: the sequence may be DNA or RNA
  source 1..14: mol_type = other RNA
caaacgttgagaag

SEQ ID NO: 1183 - RNA, 14 nt, synthetic construct
  variation 1..14: note = Description of Sequence: ASO sequence
  misc_feature 1..14: note = Note: the sequence may be DNA or RNA
  source 1..14: mol_type = other RNA
tcaaacgttgagaa

SEQ ID NO: 1184 - RNA, 14 nt, synthetic construct
  variation 1..14: note = Description of Sequence: ASO sequence
  misc_feature 1..14: note = Note: the sequence may be DNA or RNA
  source 1..14: mol_type = other RNA
gtcaaacgttgaga

SEQ ID NO: 1185 - RNA, 14 nt, synthetic construct
  variation 1..14: note = Description of Sequence: ASO sequence
  misc_feature 1..14: note = Note: the sequence may be DNA or RNA
  source 1..14: mol_type = other RNA
cgtcaaacgttgag

SEQ ID NO: 1186 - RNA, 14 nt, synthetic construct
  variation 1..14: note = Description of Sequence: ASO sequence
  misc_feature 1..14: note = Note: the sequence may be DNA or RNA
  source 1..14: mol_type = other RNA
ccgtcaaacgttga

SEQ ID NO: 1187 - RNA, 14 nt, synthetic construct
  variation 1..14: note = Description of Sequence: ASO sequence
  misc_feature 1..14: note = Note: the sequence may be DNA or RNA
  source 1..14: mol_type = other RNA
cccgtcaaacgttg

SEQ ID NO: 1188 - RNA, 14 nt, synthetic construct
  variation 1..14: note = Description of Sequence: ASO sequence
  misc_feature 1..14: note = Note: the sequence may be DNA or RNA
  source 1..14: mol_type = other RNA
tcccgtcaaacgtt

SEQ ID NO: 1189 - RNA, 14 nt, synthetic construct
  variation 1..14: note = Description of Sequence: ASO sequence
  misc_feature 1..14: note = Note: the sequence may be DNA or RNA
  source 1..14: mol_type = other RNA
ttcccgtcaaacgt

SEQ ID NO: 1190 - RNA, 14 nt, synthetic construct
  variation 1..14: note = Description of Sequence: ASO sequence
  misc_feature 1..14: note = Note: the sequence may be DNA or RNA
  source 1..14: mol_type = other RNA
cttcccgtcaaacg

SEQ ID NO: 1191 - RNA, 14 nt, synthetic construct
  variation 1..14: note = Description of Sequence: ASO sequence
  misc_feature 1..14: note = Note: the sequence may be DNA or RNA
  source 1..14: mol_type = other RNA
gcttcccgtcaaac

SEQ ID NO: 1192 - RNA, 14 nt, synthetic construct
  variation 1..14: note = Description of Sequence: ASO sequence
  misc_feature 1..14: note = Note: the sequence may be DNA or RNA
  source 1..14: mol_type = other RNA
tgcttcccgtcaaa

SEQ ID NO: 1193 - RNA, 14 nt, synthetic construct
  variation 1..14: note = Description of Sequence: ASO sequence
  misc_feature 1..14: note = Note: the sequence may be DNA or RNA
  source 1..14: mol_type = other RNA
ttgcttcccgtcaa

SEQ ID NO: 1194 - RNA, 14 nt, synthetic construct
  variation 1..14: note = Description of Sequence: ASO sequence
  misc_feature 1..14: note = Note: the sequence may be DNA or RNA
  source 1..14: mol_type = other RNA
attgcttcccgtca

SEQ ID NO: 1195 - RNA, 14 nt, synthetic construct
  variation 1..14: note = Description of Sequence: ASO sequence
  misc_feature 1..14: note = Note: the sequence may be DNA or RNA
  source 1..14: mol_type = other RNA
tattgcttcccgtc

SEQ ID NO: 1196 - RNA, 14 nt, synthetic construct
  variation 1..14: note = Description of Sequence: ASO sequence
  misc_feature 1..14: note = Note: the sequence may be DNA or RNA
  source 1..14: mol_type = other RNA
gtattgcttcccgt

SEQ ID NO: 1197 - RNA, 14 nt, synthetic construct
  variation 1..14: note = Description of Sequence: ASO sequence
  misc_feature 1..14: note = Note: the sequence may be DNA or RNA
  source 1..14: mol_type = other RNA
tgtattgcttcccg

SEQ ID NO: 1198 - RNA, 14 nt, synthetic construct
  variation 1..14: note = Description of Sequence: ASO sequence
  misc_feature 1..14: note = Note: the sequence may be DNA or RNA
  source 1..14: mol_type = other RNA
gtgtattgcttccc

SEQ ID NO: 1199 - RNA, 14 nt, synthetic construct
  variation 1..14: note = Description of Sequence: ASO sequence
  misc_feature 1..14: note = Note: the sequence may be DNA or RNA
  source 1..14: mol_type = other RNA
cgtgtattgcttcc

SEQ ID NO: 1200 - RNA, 14 nt, synthetic construct
  variation 1..14: note = Description of Sequence: ASO sequence
  misc_feature 1..14: note = Note: the sequence may be DNA or RNA
  source 1..14: mol_type = other RNA
ccgtgtattgcttc

SEQ ID NO: 1201 - RNA, 14 nt, synthetic construct
  variation 1..14: note = Description of Sequence: ASO sequence
  misc_feature 1..14: note = Note: the sequence may be DNA or RNA
  source 1..14: mol_type = other RNA
accgtgtattgctt

SEQ ID NO: 1202 - RNA, 14 nt, synthetic construct
  variation 1..14: note = Description of Sequence: ASO sequence
  misc_feature 1..14: note = Note: the sequence may be DNA or RNA
  source 1..14: mol_type = other RNA
caccgtgtattgct

SEQ ID NO: 1203 - RNA, 14 nt, synthetic construct
  variation 1..14: note = Description of Sequence: ASO sequence
  misc_feature 1..14: note = Note: the sequence may be DNA or RNA
  source 1..14: mol_type = other RNA
gcaccgtgtattgc

SEQ ID NO: 1204 - RNA, 14 nt, synthetic construct
  variation 1..14: note = Description of Sequence: ASO sequence
  misc_feature 1..14: note = Note: the sequence may be DNA or RNA
  source 1..14: mol_type = other RNA
tgcaccgtgtattg

SEQ ID NO: 1205 - RNA, 14 nt, synthetic construct
  variation 1..14: note = Description of Sequence: ASO sequence
  misc_feature 1..14: note = Note: the sequence may be DNA or RNA
  source 1..14: mol_type = other RNA
gtgcaccgtgtatt

SEQ ID NO: 1206 - RNA, 14 nt, synthetic construct
  variation 1..14: note = Description of Sequence: ASO sequence
  misc_feature 1..14: note = Note: the sequence may be DNA or RNA
  source 1..14: mol_type = other RNA
cgtgcaccgtgtat

SEQ ID NO: 1207 - RNA, 14 nt, synthetic construct
  variation 1..14: note = Description of Sequence: ASO sequence
  misc_feature 1..14: note = Note: the sequence may be DNA or RNA
  source 1..14: mol_type = other RNA
ccgtgcaccgtgta

SEQ ID NO: 1208 - RNA, 14 nt, synthetic construct
  variation 1..14: note = Description of Sequence: ASO sequence
  misc_feature 1..14: note = Note: the sequence may be DNA or RNA
  source 1..14: mol_type = other RNA
gccgtgcaccgtgt

SEQ ID NO: 1209 - RNA, 14 nt, synthetic construct
  variation 1..14: note = Description of Sequence: ASO sequence
  misc_feature 1..14: note = Note: the sequence may be DNA or RNA
  source 1..14: mol_type = other RNA
cgccgtgcaccgtg

SEQ ID NO: 1210 - RNA, 14 nt, synthetic construct
  variation 1..14: note = Description of Sequence: ASO sequence
  misc_feature 1..14: note = Note: the sequence may be DNA or RNA
  source 1..14: mol_type = other RNA
tcgccgtgcaccgt

SEQ ID NO: 1211 - RNA, 14 nt, synthetic construct
  variation 1..14: note = Description of Sequence: ASO sequence
  misc_feature 1..14: note = Note: the sequence may be DNA or RNA
  source 1..14: mol_type = other RNA
gtcgccgtgcaccg

SEQ ID NO: 1212 - RNA, 14 nt, synthetic construct
  variation 1..14: note = Description of Sequence: ASO sequence
  misc_feature 1..14: note = Note: the sequence may be DNA or RNA
  source 1..14: mol_type = other RNA
agtcgccgtgcacc

SEQ ID NO: 1213 - RNA, 14 nt, synthetic construct
  variation 1..14: note = Description of Sequence: ASO sequence
  misc_feature 1..14: note = Note: the sequence may be DNA or RNA
  source 1..14: mol_type = other RNA
cagtcgccgtgcac

SEQ ID NO: 1214 - RNA, 14 nt, synthetic construct
  variation 1..14: note = Description of Sequence: ASO sequence
  misc_feature 1..14: note = Note: the sequence may be DNA or RNA
  source 1..14: mol_type = other RNA
gcagtcgccgtgca

SEQ ID NO: 1215 - RNA, 14 nt, synthetic construct
  variation 1..14: note = Description of Sequence: ASO sequence
  misc_feature 1..14: note = Note: the sequence may be DNA or RNA
  source 1..14: mol_type = other RNA
tgcagtcgccgtgc

SEQ ID NO: 1216 - RNA, 14 nt, synthetic construct
  variation 1..14: note = Description of Sequence: ASO sequence
  misc_feature 1..14: note = Note: the sequence may be DNA or RNA
  source 1..14: mol_type = other RNA
ctgcagtcgccgtg

SEQ ID NO: 1217 - RNA, 14 nt, synthetic construct
  variation 1..14: note = Description of Sequence: ASO sequence
  misc_feature 1..14: note = Note: the sequence may be DNA or RNA
  source 1..14: mol_type = other RNA
gctgcagtcgccgt

SEQ ID NO: 1218 - RNA, 14 nt, synthetic construct
  variation 1..14: note = Description of Sequence: ASO sequence
  misc_feature 1..14: note = Note: the sequence may be DNA or RNA
  source 1..14: mol_type = other RNA
agctgcagtcgccg

SEQ ID NO: 1219 - RNA, 14 nt, synthetic construct
  variation 1..14: note = Description of Sequence: ASO sequence
  misc_feature 1..14: note = Note: the sequence may be DNA or RNA
  source 1..14: mol_type = other RNA
tagctgcagtcgcc

SEQ ID NO: 1220 - RNA, 14 nt, synthetic construct
  variation 1..14: note = Description of Sequence: ASO sequence
  misc_feature 1..14: note = Note: the sequence may be DNA or RNA
  source 1..14: mol_type = other RNA
atagctgcagtcgc

SEQ ID NO: 1221 - RNA, 14 nt, synthetic construct
  variation 1..14: note = Description of Sequence: ASO sequence
  misc_feature 1..14: note = Note: the sequence may be DNA or RNA
  source 1..14: mol_type = other RNA
catagctgcagtcg

SEQ ID NO: 1222 - RNA, 14 nt, synthetic construct
  variation 1..14: note = Description of Sequence: ASO sequence
  misc_feature 1..14: note = Note: the sequence may be DNA or RNA
  source 1..14: mol_type = other RNA
acatagctgcagtc

SEQ ID NO: 1223 - RNA, 14 nt, synthetic construct
  variation 1..14: note = Description of Sequence: ASO sequence
  misc_feature 1..14: note = Note: the sequence may be DNA or RNA
  source 1..14: mol_type = other RNA
cacatagctgcagt

SEQ ID NO: 1224 - RNA, 14 nt, synthetic construct
  variation 1..14: note = Description of Sequence: ASO sequence
  misc_feature 1..14: note = Note: the sequence may be DNA or RNA
  source 1..14: mol_type = other RNA
gcacatagctgcag

SEQ ID NO: 1225 - RNA, 14 nt, synthetic construct
  variation 1..14: note = Description of Sequence: ASO sequence
  misc_feature 1..14: note = Note: the sequence may be DNA or RNA
  source 1..14: mol_type = other RNA
agcacatagctgca

SEQ ID NO: 1226 - RNA, 14 nt, synthetic construct
  variation 1..14: note = Description of Sequence: ASO sequence
  misc_feature 1..14: note = Note: the sequence may be DNA or RNA
  source 1..14: mol_type = other RNA
cagcacatagctgc

SEQ ID NO: 1227 - RNA, 14 nt, synthetic construct
  variation 1..14: note = Description of Sequence: ASO sequence
  misc_feature 1..14: note = Note: the sequence may be DNA or RNA
  source 1..14: mol_type = other RNA
tcagcacatagctg

SEQ ID NO: 1228 - RNA, 14 nt, synthetic construct
  variation 1..14: note = Description of Sequence: ASO sequence
  misc_feature 1..14: note = Note: the sequence may be DNA or RNA
  source 1..14: mol_type = other RNA
gtcagcacatagct

SEQ ID NO: 1229 - RNA, 14 nt, synthetic construct
  variation 1..14: note = Description of Sequence: ASO sequence
  misc_feature 1..14: note = Note: the sequence may be DNA or RNA
  source 1..14: mol_type = other RNA
ggtcagcacatagc

SEQ ID NO: 1230 - RNA, 14 nt, synthetic construct
  variation 1..14: note = Description of Sequence: ASO sequence
  misc_feature 1..14: note = Note: the sequence may be DNA or RNA
  source 1..14: mol_type = other RNA
tggtcagcacatag

SEQ ID NO: 1231 - RNA, 14 nt, synthetic construct
  variation 1..14: note = Description of Sequence: ASO sequence
  misc_feature 1..14: note = Note: the sequence may be DNA or RNA
  source 1..14: mol_type = other RNA
ttggtcagcacata

SEQ ID NO: 1232 - RNA, 14 nt, synthetic construct
  variation 1..14: note = Description of Sequence: ASO sequence
  misc_feature 1..14: note = Note: the sequence may be DNA or RNA
  source 1..14: mol_type = other RNA
cttggtcagcacat

SEQ ID NO: 1233 - RNA, 14 nt, synthetic construct
  variation 1..14: note = Description of Sequence: ASO sequence
  misc_feature 1..14: note = Note: the sequence may be DNA or RNA
  source 1..14: mol_type = other RNA
ttgatcaccaccac

SEQ ID NO: 1234 - RNA, 14 nt, synthetic construct
  variation 1..14: note = Description of Sequence: ASO sequence
  misc_feature 1..14: note = Note: the sequence may be DNA or RNA
  source 1..14: mol_type = other RNA
cttgatcaccacca

SEQ ID NO: 1235 - RNA, 14 nt, synthetic construct
  variation 1..14: note = Description of Sequence: ASO sequence
  misc_feature 1..14: note = Note: the sequence may be DNA or RNA
  source 1..14: mol_type = other RNA
ccttgatcaccacc

SEQ ID NO: 1236 - RNA, 14 nt, synthetic construct
  variation 1..14: note = Description of Sequence: ASO sequence
  misc_feature 1..14: note = Note: the sequence may be DNA or RNA
  source 1..14: mol_type = other RNA
gccttgatcaccac

SEQ ID NO: 1237 - RNA, 14 nt, synthetic construct
  variation 1..14: note = Description of Sequence: ASO sequence
  misc_feature 1..14: note = Note: the sequence may be DNA or RNA
  source 1..14: mol_type = other RNA
ggccttgatcacca

SEQ ID NO: 1238 - RNA, 14 nt, synthetic construct
  variation 1..14: note = Description of Sequence: ASO sequence
  misc_feature 1..14: note = Note: the sequence may be DNA or RNA
  source 1..14: mol_type = other RNA
tggccttgatcacc

SEQ ID NO: 1239 - RNA, 14 nt, synthetic construct
  variation 1..14: note = Description of Sequence: ASO sequence
  misc_feature 1..14: note = Note: the sequence may be DNA or RNA
  source 1..14: mol_type = other RNA
ctggccttgatcac

SEQ ID NO: 1240 - RNA, 14 nt, synthetic construct
  variation 1..14: note = Description of Sequence: ASO sequence
  misc_feature 1..14: note = Note: the sequence may be DNA or RNA
  source 1..14: mol_type = other RNA
actggccttgatca

SEQ ID NO: 1241 - RNA, 14 nt, synthetic construct
  variation 1..14: note = Description of Sequence: ASO sequence
  misc_feature 1..14: note = Note: the sequence may be DNA or RNA
  source 1..14: mol_type = other RNA
cactggccttgatc

SEQ ID NO: 1242 - RNA, 14 nt, synthetic construct
  variation 1..14: note = Description of Sequence: ASO sequence
  misc_feature 1..14: note = Note: the sequence may be DNA or RNA
  source 1..14: mol_type = other RNA
ccactggccttgat

SEQ ID NO: 1243 - RNA, 14 nt, synthetic construct
  variation 1..14: note = Description of Sequence: ASO sequence
  misc_feature 1..14: note = Note: the sequence may be DNA or RNA
  source 1..14: mol_type = other RNA
cccactggccttga

SEQ ID NO: 1244 - RNA, 14 nt, synthetic construct
  variation 1..14: note = Description of Sequence: ASO sequence
  misc_feature 1..14: note = Note: the sequence may be DNA or RNA
  source 1..14: mol_type = other RNA
ccccactggccttg

SEQ ID NO: 1245 - RNA, 14 nt, synthetic construct
  variation 1..14: note = Description of Sequence: ASO sequence
  misc_feature 1..14: note = Note: the sequence may be DNA or RNA
  source 1..14: mol_type = other RNA
tccccactggcctt

SEQ ID NO: 1246 - RNA, 14 nt, synthetic construct
  variation 1..14: note = Description of Sequence: ASO sequence
  misc_feature 1..14: note = Note: the sequence may be DNA or RNA
  source 1..14: mol_type = other RNA
ttccccactggcct

SEQ ID NO: 1247 - RNA, 14 nt, synthetic construct
  variation 1..14: note = Description of Sequence: ASO sequence
  misc_feature 1..14: note = Note: the sequence may be DNA or RNA
  source 1..14: mol_type = other RNA
cttccccactggcc

SEQ ID NO: 1248 - RNA, 14 nt, synthetic construct
  variation 1..14: note = Description of Sequence: ASO sequence
  misc_feature 1..14: note = Note: the sequence may be DNA or RNA
  source 1..14: mol_type = other RNA
acttccccactggc

SEQ ID NO: 1249 - RNA, 14 nt, synthetic construct
  variation 1..14: note = Description of Sequence: ASO sequence
  misc_feature 1..14: note = Note: the sequence may be DNA or RNA
  source 1..14: mol_type = other RNA
cacttccccactgg

SEQ ID NO: 1250 - RNA, 14 nt, synthetic construct
  variation 1..14: note = Description of Sequence: ASO sequence
  misc_feature 1..14: note = Note: the sequence may be DNA or RNA
  source 1..14: mol_type = other RNA
acacttccccactg

SEQ ID NO: 1251 - RNA, 14 nt, synthetic construct
  variation 1..14: note = Description of Sequence: ASO sequence
  misc_feature 1..14: note = Note: the sequence may be DNA or RNA
  source 1..14: mol_type = other RNA
aacacttccccact

SEQ ID NO: 1252 - RNA, 14 nt, synthetic construct
  variation 1..14: note = Description of Sequence: ASO sequence
  misc_feature 1..14: note = Note: the sequence may be DNA or RNA
  source 1..14: mol_type = other RNA
gaacacttccccac

SEQ ID NO: 1253 - RNA, 14 nt, synthetic construct
  variation 1..14: note = Description of Sequence: ASO sequence
  misc_feature 1..14: note = Note: the sequence may be DNA or RNA
  source 1..14: mol_type = other RNA
ggaacacttcccca

SEQ ID NO: 1254 - RNA, 14 nt, synthetic construct
  variation 1..14: note = Description of Sequence: ASO sequence
  misc_feature 1..14: note = Note: the sequence may be DNA or RNA
  source 1..14: mol_type = other RNA
aggaacacttcccc

SEQ ID NO: 1255 - RNA, 14 nt, synthetic construct
  variation 1..14: note = Description of Sequence: ASO sequence
  misc_feature 1..14: note = Note: the sequence may be DNA or RNA
  source 1..14: mol_type = other RNA
caggaacacttccc

SEQ ID NO: 1256 - RNA, 14 nt, synthetic construct
  variation 1..14: note = Description of Sequence: ASO sequence
  misc_feature 1..14: note = Note: the sequence may be DNA or RNA
  source 1..14: mol_type = other RNA
tcaggaacacttcc

SEQ ID NO: 1257 - RNA, 14 nt, synthetic construct
  variation 1..14: note = Description of Sequence: ASO sequence
  misc_feature 1..14: note = Note: the sequence may be DNA or RNA
  source 1..14: mol_type = other RNA
ttcaggaacacttc

SEQ ID NO: 1258 - RNA, 14 nt, synthetic construct
  variation 1..14: note = Description of Sequence: ASO sequence
  misc_feature 1..14: note = Note: the sequence may be DNA or RNA
  source 1..14: mol_type = other RNA
gttcaggaacactt

SEQ ID NO: 1259 - RNA, 14 nt, synthetic construct
  variation 1..14: note = Description of Sequence: ASO sequence
  misc_feature 1..14: note = Note: the sequence may be DNA or RNA
  source 1..14: mol_type = other RNA
ggttcaggaacact

SEQ ID NO: 1260 - RNA, 14 nt, synthetic construct
  variation 1..14: note = Description of Sequence: ASO sequence
  misc_feature 1..14: note = Note: the sequence may be DNA or RNA
  source 1..14: mol_type = other RNA
tggttcaggaacac

SEQ ID NO: 1261 - RNA, 14 nt, synthetic construct
  variation 1..14: note = Description of Sequence: ASO sequence
  misc_feature 1..14: note = Note: the sequence may be DNA or RNA
  source 1..14: mol_type = other RNA
ctggttcaggaaca

SEQ ID NO: 1262 - RNA, 14 nt, synthetic construct
  variation 1..14: note = Description of Sequence: ASO sequence
  misc_feature 1..14: note = Note: the sequence may be DNA or RNA
  source 1..14: mol_type = other RNA
tctggttcaggaac

SEQ ID NO: 1263 - RNA, 14 nt, synthetic construct
  variation 1..14: note = Description of Sequence: ASO sequence
  misc_feature 1..14: note = Note: the sequence may be DNA or RNA
  source 1..14: mol_type = other RNA
atctggttcaggaa

SEQ ID NO: 1264 - RNA, 14 nt, synthetic construct
  variation 1..14: note = Description of Sequence: ASO sequence
  misc_feature 1..14: note = Note: the sequence may be DNA or RNA
  source 1..14: mol_type = other RNA
gatctggttcagga

SEQ ID NO: 1265 - RNA, 14 nt, synthetic construct
  variation 1..14: note = Description of Sequence: ASO sequence
  misc_feature 1..14: note = Note: the sequence may be DNA or RNA
  source 1..14: mol_type = other RNA
agatctggttcagg

SEQ ID NO: 1266 - RNA, 14 nt, synthetic construct
  variation 1..14: note = Description of Sequence: ASO sequence
  misc_feature 1..14: note = Note: the sequence may be DNA or RNA
  source 1..14: mol_type = other RNA
tagatctggttcag

SEQ ID NO: 1267 - RNA, 14 nt, synthetic construct
  variation 1..14: note = Description of Sequence: ASO sequence
  misc_feature 1..14: note = Note: the sequence may be DNA or RNA
  source 1..14: mol_type = other RNA
gtagatctggttca

SEQ ID NO: 1268 - RNA, 14 nt, synthetic construct
  variation 1..14: note = Description of Sequence: ASO sequence
  misc_feature 1..14: note = Note: the sequence may be DNA or RNA
  source 1..14: mol_type = other RNA
tgtagatctggttc

SEQ ID NO: 1269 - RNA, 14 nt, synthetic construct
  variation 1..14: note = Description of Sequence: ASO sequence
  misc_feature 1..14: note = Note: the sequence may be DNA or RNA
  source 1..14: mol_type = other RNA
gtgtagatctggtt

SEQ ID NO: 1270 - RNA, 14 nt, synthetic construct
  variation 1..14: note = Description of Sequence: ASO sequence
  misc_feature 1..14: note = Note: the sequence may be DNA or RNA
  source 1..14: mol_type = other RNA
ggtgtagatctggt

SEQ ID NO: 1271 - RNA, 14 nt, synthetic construct
  variation 1..14: note = Description of Sequence: ASO sequence
  misc_feature 1..14: note = Note: the sequence may be DNA or RNA
  source 1..14: mol_type = other RNA
gggtgtagatctgg

SEQ ID NO: 1272 - RNA, 14 nt, synthetic construct
  variation 1..14: note = Description of Sequence: ASO sequence
  misc_feature 1..14: note = Note: the sequence may be DNA or RNA
  source 1..14: mol_type = other RNA
tgggtgtagatctg

SEQ ID NO: 1273 - RNA, 14 nt, synthetic construct
  variation 1..14: note = Description of Sequence: ASO sequence
  misc_feature 1..14: note = Note: the sequence may be DNA or RNA
  source 1..14: mol_type = other RNA
ctgggtgtagatct

SEQ ID NO: 1274 - RNA, 14 nt, synthetic construct
  variation 1..14: note = Description of Sequence: ASO sequence
  misc_feature 1..14: note = Note: the sequence may be DNA or RNA
  source 1..14: mol_type = other RNA
gctgggtgtagatc

SEQ ID NO: 1275 - RNA, 14 nt, synthetic construct
  variation 1..14: note = Description of Sequence: ASO sequence
  misc_feature 1..14: note = Note: the sequence may be DNA or RNA
  source 1..14: mol_type = other RNA
agctgggtgtagat

SEQ ID NO: 1276 - RNA, 14 nt, synthetic construct
  variation 1..14: note = Description of Sequence: ASO sequence
  misc_feature 1..14: note = Note: the sequence may be DNA or RNA
  source 1..14: mol_type = other RNA
cagctgggtgtaga

SEQ ID NO: 1277 - RNA, 14 nt, synthetic construct
  variation 1..14: note = Description of Sequence: ASO sequence
  misc_feature 1..14: note = Note: the sequence may be DNA or RNA
  source 1..14: mol_type = other RNA
gcagctgggtgtag

SEQ ID NO: 1278 - RNA, 14 nt, synthetic construct
  variation 1..14: note = Description of Sequence: ASO sequence
  misc_feature 1..14: note = Note: the sequence may be DNA or RNA
  source 1..14: mol_type = other RNA
ggcagctgggtgta

SEQ ID NO: 1279 - RNA, 14 nt, synthetic construct
  variation 1..14: note = Description of Sequence: ASO sequence
  misc_feature 1..14: note = Note: the sequence may be DNA or RNA
  source 1..14: mol_type = other RNA
gggcagctgggtgt

SEQ ID NO: 1280 - RNA, 14 nt, synthetic construct
  variation 1..14: note = Description of Sequence: ASO sequence
  misc_feature 1..14: note = Note: the sequence may be DNA or RNA
  source 1..14: mol_type = other RNA
tgggcagctgggtg

SEQ ID NO: 1281 - RNA, 14 nt, synthetic construct
  variation 1..14: note = Description of Sequence: ASO sequence
  misc_feature 1..14: note = Note: the sequence may be DNA or RNA
  source 1..14: mol_type = other RNA
atgggcagctgggt

SEQ ID NO: 1282 - RNA, 14 nt, synthetic construct
  variation 1..14: note = Description of Sequence: ASO sequence
  misc_feature 1..14: note = Note: the sequence may be DNA or RNA
  source 1..14: mol_type = other RNA
gatgggcagctggg

SEQ ID NO: 1283 - RNA, 14 nt, synthetic construct
  variation 1..14: note = Description of Sequence: ASO sequence
  misc_feature 1..14: note = Note: the sequence may be DNA or RNA
  source 1..14: mol_type = other RNA
agatgggcagctgg

SEQ ID NO: 1284 - RNA, 14 nt, synthetic construct
  variation 1..14: note = Description of Sequence: ASO sequence
  misc_feature 1..14: note = Note: the sequence may be DNA or RNA
  source 1..14: mol_type = other RNA
gagatgggcagctg

SEQ ID NO: 1285 - RNA, 14 nt, synthetic construct
  variation 1..14: note = Description of Sequence: ASO sequence
  misc_feature 1..14: note = Note: the sequence may be DNA or RNA
  source 1..14: mol_type = other RNA
agagatgggcagct

SEQ ID NO: 1286 - RNA, 14 nt, synthetic construct
  variation 1..14: note = Description of Sequence: ASO sequence
  misc_feature 1..14: note = Note: the sequence may be DNA or RNA
  source 1..14: mol_type = other RNA
cagagatgggcagc

SEQ ID NO: 1287 - RNA, 14 nt, synthetic construct
  variation 1..14: note = Description of Sequence: ASO sequence
  misc_feature 1..14: note = Note: the sequence may be DNA or RNA
  source 1..14: mol_type = other RNA
gcagagatgggcag

SEQ ID NO: 1288 - RNA, 14 nt, synthetic construct
  variation 1..14: note = Description of Sequence: ASO sequence
  misc_feature 1..14: note = Note: the sequence may be DNA or RNA
  source 1..14: mol_type = other RNA
tgcagagatgggca

SEQ ID NO: 1289 - RNA, 14 nt, synthetic construct
  variation 1..14: note = Description of Sequence: ASO sequence
  misc_feature 1..14: note = Note: the sequence may be DNA or RNA
  source 1..14: mol_type = other RNA
ctgcagagatgggc

SEQ ID NO: 1290 - RNA, 14 nt, synthetic construct
  variation 1..14: note = Description of Sequence: ASO sequence
  misc_feature 1..14: note = Note: the sequence may be DNA or RNA
  source 1..14: mol_type = other RNA
cgccgggttcaggg

SEQ ID NO: 1291 - RNA, 14 nt, synthetic construct
  variation 1..14: note = Description of Sequence: ASO sequence
  misc_feature 1..14: note = Note: the sequence may be DNA or RNA
  source 1..14: mol_type = other RNA
gcgccgggttcagg

SEQ ID NO: 1292 - RNA, 14 nt, synthetic construct
  variation 1..14: note = Description of Sequence: ASO sequence
  misc_feature 1..14: note = Note: the sequence may be DNA or RNA
  source 1..14: mol_type = other RNA
tgcgccgggttcag

SEQ ID NO: 1293 - RNA, 14 nt, synthetic construct
  variation 1..14: note = Description of Sequence: ASO sequence
  misc_feature 1..14: note = Note: the sequence may be DNA or RNA
  source 1..14: mol_type = other RNA
gtgcgccgggttca

SEQ ID NO: 1294 - RNA, 14 nt, synthetic construct
  variation 1..14: note = Description of Sequence: ASO sequence
  misc_feature 1..14: note = Note: the sequence may be DNA or RNA
  source 1..14: mol_type = other RNA
tgtgcgccgggttc

SEQ ID NO: 1295 - RNA, 14 nt, synthetic construct
  variation 1..14: note = Description of Sequence: ASO sequence
  misc_feature 1..14: note = Note: the sequence may be DNA or RNA
  source 1..14: mol_type = other RNA
ttgtgcgccgggtt

SEQ ID NO: 1296 - RNA, 14 nt, synthetic construct
  variation 1..14: note = Description of Sequence: ASO sequence
  misc_feature 1..14: note = Note: the sequence may be DNA or RNA
  source 1..14: mol_type = other RNA
attgtgcgccgggt

SEQ ID NO: 1297 - RNA, 14 nt, synthetic construct
  variation 1..14: note = Description of Sequence: ASO sequence
  misc_feature 1..14: note = Note: the sequence may be DNA or RNA
  source 1..14: mol_type = other RNA
cattgtgcgccggg

SEQ ID NO: 1298 - RNA, 14 nt, synthetic construct
  variation 1..14: note = Description of Sequence: ASO sequence
  misc_feature 1..14: note = Note: the sequence may be DNA or RNA
  source 1..14: mol_type = other RNA
ccattgtgcgccgg

SEQ ID NO: 1299 - RNA, 14 nt, synthetic construct
  variation 1..14: note = Description of Sequence: ASO sequence
  misc_feature 1..14: note = Note: the sequence may be DNA or RNA
  source 1..14: mol_type = other RNA
cccattgtgcgccg

SEQ ID NO: 1300 - RNA, 14 nt, synthetic construct
  variation 1..14: note = Description of Sequence: ASO sequence
  misc_feature 1..14: note = Note: the sequence may be DNA or RNA
  source 1..14: mol_type = other RNA
gcccattgtgcgcc

SEQ ID NO: 1301 - RNA, 14 nt, synthetic construct
  variation 1..14: note = Description of Sequence: ASO sequence
  misc_feature 1..14: note = Note: the sequence may be DNA or RNA
  source 1..14: mol_type = other RNA
cgcccattgtgcgc

SEQ ID NO: 1302 - RNA, 14 nt, synthetic construct
  variation 1..14: note = Description of Sequence: ASO sequence
  misc_feature 1..14: note = Note: the sequence may be DNA or RNA
  source 1..14: mol_type = other RNA
ccgcccattgtgcg

SEQ ID NO: 1303 - RNA, 14 nt, synthetic construct
  variation 1..14: note = Description of Sequence: ASO sequence
  misc_feature 1..14: note = Note: the sequence may be DNA or RNA
  source 1..14: mol_type = other RNA
cccgcccattgtgc

SEQ ID NO: 1304 - RNA, 14 nt, synthetic construct
  variation 1..14: note = Description of Sequence: ASO sequence
  misc_feature 1..14: note = Note: the sequence may be DNA or RNA
  source 1..14: mol_type = other RNA
acccgcccattgtg

SEQ ID NO: 1305 - RNA, 14 nt, synthetic construct
  variation 1..14: note = Description of Sequence: ASO sequence
  misc_feature 1..14: note = Note: the sequence may be DNA or RNA
  source 1..14: mol_type = other RNA
cacccgcccattgt

SEQ ID NO: 1306 - RNA, 14 nt, synthetic construct
  variation 1..14: note = Description of Sequence: ASO sequence
  misc_feature 1..14: note = Note: the sequence may be DNA or RNA
  source 1..14: mol_type = other RNA
acacccgcccattg

SEQ ID NO: 1307 - RNA, 14 nt, synthetic construct
  variation 1..14: note = Description of Sequence: ASO sequence
  misc_feature 1..14: note = Note: the sequence may be DNA or RNA
  source 1..14: mol_type = other RNA
cacacccgcccatt

SEQ ID NO: 1308 - RNA, 14 nt, synthetic construct
  variation 1..14: note = Description of Sequence: ASO sequence
  misc_feature 1..14: note = Note: the sequence may be DNA or RNA
  source 1..14: mol_type = other RNA
gcacacccgcccat

SEQ ID NO: 1309 - RNA, 14 nt, synthetic construct
  variation 1..14: note = Description of Sequence: ASO sequence
  misc_feature 1..14: note = Note: the sequence may be DNA or RNA
  source 1..14: mol_type = other RNA
tgcacacccgccca

SEQ ID NO: 1310 - RNA, 14 nt, synthetic construct
  variation 1..14: note = Description of Sequence: ASO sequence
  misc_feature 1..14: note = Note: the sequence may be DNA or RNA
  source 1..14: mol_type = other RNA
ctgcacacccgccc

SEQ ID NO: 1311 - RNA, 14 nt, synthetic construct
  variation 1..14: note = Description of Sequence: ASO sequence
  misc_feature 1..14: note = Note: the sequence may be DNA or RNA
  source 1..14: mol_type = other RNA
gctgcacacccgcc

SEQ ID NO: 1312 - RNA, 14 nt, synthetic construct
  variation 1..14: note = Description of Sequence: ASO sequence
  misc_feature 1..14: note = Note: the sequence may be DNA or RNA
  source 1..14: mol_type = other RNA
tgctgcacacccgc

SEQ ID NO: 1313 - RNA, 14 nt, synthetic construct
  variation 1..14: note = Description of Sequence: ASO sequence
  misc_feature 1..14: note = Note: the sequence may be DNA or RNA
  source 1..14: mol_type = other RNA
gtgctgcacacccg

SEQ ID NO: 1314 - RNA, 14 nt, synthetic construct
  variation 1..14: note = Description of Sequence: ASO sequence
  misc_feature 1..14: note = Note: the sequence may be DNA or RNA
  source 1..14: mol_type = other RNA
ggtgctgcacaccc

SEQ ID NO: 1315 - RNA, 14 nt, synthetic construct
  variation 1..14: note = Description of Sequence: ASO sequence
  misc_feature 1..14: note = Note: the sequence may be DNA or RNA
  source 1..14: mol_type = other RNA
aggtgctgcacacc

SEQ ID NO: 1316 - RNA, 14 nt, synthetic construct
  variation 1..14: note = Description of Sequence: ASO sequence
  misc_feature 1..14: note = Note: the sequence may be DNA or RNA
  source 1..14: mol_type = other RNA
caggtgctgcacac

SEQ ID NO: 1317 - RNA, 14 nt, synthetic construct
  variation 1..14: note = Description of Sequence: ASO sequence
  misc_feature 1..14: note = Note: the sequence may be DNA or RNA
  source 1..14: mol_type = other RNA
ccaggtgctgcaca

SEQ ID NO: 1318 - RNA, 14 nt, synthetic construct
  variation 1..14: note = Description of Sequence: ASO sequence
  misc_feature 1..14: note = Note: the sequence may be DNA or RNA
  source 1..14: mol_type = other RNA
cccaggtgctgcac

SEQ ID NO: 1319 - RNA, 14 nt, synthetic construct
  variation 1..14: note = Description of Sequence: ASO sequence
  misc_feature 1..14: note = Note: the sequence may be DNA or RNA
  source 1..14: mol_type = other RNA
ccccaggtgctgca

SEQ ID NO: 1320 - RNA, 14 nt, synthetic construct
  variation 1..14: note = Description of Sequence: ASO sequence
  misc_feature 1..14: note = Note: the sequence may be DNA or RNA
  source 1..14: mol_type = other RNA
accccaggtgctgc

SEQ ID NO: 1321 - RNA, 14 nt, synthetic construct
  variation 1..14: note = Description of Sequence: ASO sequence
  misc_feature 1..14: note = Note: the sequence may be DNA or RNA
  source 1..14: mol_type = other RNA
caccccaggtgctg

SEQ ID NO: 1322 - RNA, 14 nt, synthetic construct
  variation 1..14: note = Description of Sequence: ASO sequence
  misc_feature 1..14: note = Note: the sequence may be DNA or RNA
  source 1..14: mol_type = other RNA
tcaccccaggtgct

SEQ ID NO: 1323 - RNA, 14 nt, synthetic construct
  variation 1..14: note = Description of Sequence: ASO sequence
  misc_feature 1..14: note = Note: the sequence may be DNA or RNA
  source 1..14: mol_type = other RNA
gtcaccccaggtgc

SEQ ID NO: 1324 - RNA, 14 nt, synthetic construct
  variation 1..14: note = Description of Sequence: ASO sequence
  misc_feature 1..14: note = Note: the sequence may be DNA or RNA
  source 1..14: mol_type = other RNA
agtcaccccaggtg

SEQ ID NO: 1325 - RNA, 14 nt, synthetic construct
  variation 1..14: note = Description of Sequence: ASO sequence
  misc_feature 1..14: note = Note: the sequence may be DNA or RNA
  source 1..14: mol_type = other RNA
aagtcaccccaggt

SEQ ID NO: 1326 - RNA, 14 nt, synthetic construct
  variation 1..14: note = Description of Sequence: ASO sequence
  misc_feature 1..14: note = Note: the sequence may be DNA or RNA
  source 1..14: mol_type = other RNA
gaagtcaccccagg

SEQ ID NO: 1327 - RNA, 14 nt, synthetic construct
  variation 1..14: note = Description of Sequence: ASO sequence
  misc_feature 1..14: note = Note: the sequence may be DNA or RNA
  source 1..14: mol_type = other RNA
ggaagtcaccccag

SEQ ID NO: 1328 - RNA, 14 nt, synthetic construct
  variation 1..14: note = Description of Sequence: ASO sequence
  misc_feature 1..14: note = Note: the sequence may be DNA or RNA
  source 1..14: mol_type = other RNA
tggaagtcacccca

SEQ ID NO: 1329 - RNA, 14 nt, synthetic construct
  variation 1..14: note = Description of Sequence: ASO sequence
  misc_feature 1..14: note = Note: the sequence may be DNA or RNA
  source 1..14: mol_type = other RNA
gtggaagtcacccc

SEQ ID NO: 1330 - RNA, 14 nt, synthetic construct
  variation 1..14: note = Description of Sequence: ASO sequence
  misc_feature 1..14: note = Note: the sequence may be DNA or RNA
  source 1..14: mol_type = other RNA
agtggaagtcaccc

SEQ ID NO: 1331 - RNA, 14 nt, synthetic construct
  variation 1..14: note = Description of Sequence: ASO sequence
  misc_feature 1..14: note = Note: the sequence may be DNA or RNA
  source 1..14: mol_type = other RNA
tagtggaagtcacc

SEQ ID NO: 1332 - RNA, 14 nt, synthetic construct
  variation 1..14: note = Description of Sequence: ASO sequence
  misc_feature 1..14: note = Note: the sequence may be DNA or RNA
  source 1..14: mol_type = other RNA
gtagtggaagtcac

SEQ ID NO: 1333 - RNA, 14 nt, synthetic construct
  variation 1..14: note = Description of Sequence: ASO sequence
  misc_feature 1..14: note = Note: the sequence may be DNA or RNA
  source 1..14: mol_type = other RNA
tgtagtggaagtca

SEQ ID NO: 1334 - RNA, 14 nt, synthetic construct
  variation 1..14: note = Description of Sequence: ASO sequence
  misc_feature 1..14: note = Note: the sequence may be DNA or RNA
  source 1..14: mol_type = other RNA
ttgtagtggaagtc

SEQ ID NO: 1335 - RNA, 14 nt, synthetic construct
  variation 1..14: note = Description of Sequence: ASO sequence
  misc_feature 1..14: note = Note: the sequence may be DNA or RNA
  source 1..14: mol_type = other RNA
cttgtagtggaagt

SEQ ID NO: 1336 - RNA, 14 nt, synthetic construct
  variation 1..14: note = Description of Sequence: ASO sequence
  misc_feature 1..14: note = Note: the sequence may be DNA or RNA
  source 1..14: mol_type = other RNA
tcttgtagtggaag

SEQ ID NO: 1337 - RNA, 14 nt, synthetic construct
  variation 1..14: note = Description of Sequence: ASO sequence
  misc_feature 1..14: note = Note: the sequence may be DNA or RNA
  source 1..14: mol_type = other RNA
gtcttgtagtggaa

SEQ ID NO: 1338 - RNA, 14 nt, synthetic construct
  variation 1..14: note = Description of Sequence: ASO sequence
  misc_feature 1..14: note = Note: the sequence may be DNA or RNA
  source 1..14: mol_type = other RNA
ggtcttgtagtgga

SEQ ID NO: 1339 - RNA, 14 nt, synthetic construct
  variation 1..14: note = Description of Sequence: ASO sequence
  misc_feature 1..14: note = Note: the sequence may be DNA or RNA
  source 1..14: mol_type = other RNA
aggtcttgtagtgg

SEQ ID NO: 1340 - RNA, 14 nt, synthetic construct
  variation 1..14: note = Description of Sequence: ASO sequence
  misc_feature 1..14: note = Note: the sequence may be DNA or RNA
  source 1..14: mol_type = other RNA
aaggtcttgtagtg

SEQ ID NO: 1341 - RNA, 14 nt, synthetic construct
  variation 1..14: note = Description of Sequence: ASO sequence
  misc_feature 1..14: note = Note: the sequence may be DNA or RNA
  source 1..14: mol_type = other RNA
gaaggtcttgtagt

SEQ ID NO: 1342 - RNA, 14 nt, synthetic construct
  variation 1..14: note = Description of Sequence: ASO sequence
  misc_feature 1..14: note = Note: the sequence may be DNA or RNA
  source 1..14: mol_type = other RNA
cgaaggtcttgtag

SEQ ID NO: 1343 - RNA, 14 nt, synthetic construct
  variation 1..14: note = Description of Sequence: ASO sequence
  misc_feature 1..14: note = Note: the sequence may be DNA or RNA
  source 1..14: mol_type = other RNA
tcgaaggtcttgta

SEQ ID NO: 1344 - RNA, 14 nt, synthetic construct
  variation 1..14: note = Description of Sequence: ASO sequence
  misc_feature 1..14: note = Note: the sequence may be DNA or RNA
  source 1..14: mol_type = other RNA
gtcgaaggtcttgt

SEQ ID NO: 1345 - RNA, 14 nt, synthetic construct
  variation 1..14: note = Description of Sequence: ASO sequence
  misc_feature 1..14: note = Note: the sequence may be DNA or RNA
  source 1..14: mol_type = other RNA
cgtcgaaggtcttg

SEQ ID NO: 1346 - RNA, 14 nt, synthetic construct
  variation 1..14: note = Description of Sequence: ASO sequence
  misc_feature 1..14: note = Note: the sequence may be DNA or RNA
  source 1..14: mol_type = other RNA
ccgtcgaaggtctt

SEQ ID NO: 1347 - RNA, 14 nt, synthetic construct
  variation 1..14: note = Description of Sequence: ASO sequence
  misc_feature 1..14: note = Note: the sequence may be DNA or RNA
  source 1..14: mol_type = other RNA
gccgtcgaaggtct

SEQ ID NO: 1348 - RNA, 14 nt, synthetic construct
  variation 1..14: note = Description of Sequence: ASO sequence
  misc_feature 1..14: note = Note: the sequence may be DNA or RNA
  source 1..14: mol_type = other RNA
cgccgtcgaaggtc

SEQ ID NO: 1349 - RNA, 14 nt, synthetic construct
  variation 1..14: note = Description of Sequence: ASO sequence
  misc_feature 1..14: note = Note: the sequence may be DNA or RNA
  source 1..14: mol_type = other RNA
tcgccgtcgaaggt

SEQ ID NO: 1350 - RNA, 14 nt, synthetic construct
  variation 1..14: note = Description of Sequence: ASO sequence
  misc_feature 1..14: note = Note: the sequence may be DNA or RNA
  source 1..14: mol_type = other RNA
gtcgccgtcgaagg

SEQ ID NO: 1351 - RNA, 14 nt, synthetic construct
  variation 1..14: note = Description of Sequence: ASO sequence
  misc_feature 1..14: note = Note: the sequence may be DNA or RNA
  source 1..14: mol_type = other RNA
cgtcgccgtcgaag

SEQ ID NO: 1352 - RNA, 14 nt, synthetic construct
  variation 1..14: note = Description of Sequence: ASO sequence
  misc_feature 1..14: note = Note: the sequence may be DNA or RNA
  source 1..14: mol_type = other RNA
acgtcgccgtcgaa

SEQ ID NO: 1353 - RNA, 14 nt, synthetic construct
  variation 1..14: note = Description of Sequence: ASO sequence
  misc_feature 1..14: note = Note: the sequence may be DNA or RNA
  source 1..14: mol_type = other RNA
gacgtcgccgtcga

SEQ ID NO: 1354 - RNA, 14 nt, synthetic construct
  variation 1..14: note = Description of Sequence: ASO sequence
  misc_feature 1..14: note = Note: the sequence may be DNA or RNA
  source 1..14: mol_type = other RNA
agacgtcgccgtcg

SEQ ID NO: 1355 - RNA, 14 nt, synthetic construct
  variation 1..14: note = Description of Sequence: ASO sequence
  misc_feature 1..14: note = Note: the sequence may be DNA or RNA
  source 1..14: mol_type = other RNA
aagacgtcgccgtc

SEQ ID NO: 1356 - RNA, 14 nt, synthetic construct
  variation 1..14: note = Description of Sequence: ASO sequence
  misc_feature 1..14: note = Note: the sequence may be DNA or RNA
  source 1..14: mol_type = other RNA
gaagacgtcgccgt

SEQ ID NO: 1357 - RNA, 14 nt, synthetic construct
  variation 1..14: note = Description of Sequence: ASO sequence
  misc_feature 1..14: note = Note: the sequence may be DNA or RNA
  source 1..14: mol_type = other RNA
ggaagacgtcgccg

SEQ ID NO: 1358 - RNA, 14 nt, synthetic construct
  variation 1..14: note = Description of Sequence: ASO sequence
  misc_feature 1..14: note = Note: the sequence may be DNA or RNA
  source 1..14: mol_type = other RNA
cggaagacgtcgcc

SEQ ID NO: 1359 - RNA, 14 nt, synthetic construct
  variation 1..14: note = Description of Sequence: ASO sequence
  misc_feature 1..14: note = Note: the sequence may be DNA or RNA
  source 1..14: mol_type = other RNA
gcggaagacgtcgc

SEQ ID NO: 1360 - RNA, 14 nt, synthetic construct
  variation 1..14: note = Description of Sequence: ASO sequence
  misc_feature 1..14: note = Note: the sequence may be DNA or RNA
  source 1..14: mol_type = other RNA
agcggaagacgtcg

SEQ ID NO: 1361 - RNA, 14 nt, synthetic construct
  variation 1..14: note = Description of Sequence: ASO sequence
  misc_feature 1..14: note = Note: the sequence may be DNA or RNA
  source 1..14: mol_type = other RNA
aagcggaagacgtc

SEQ ID NO: 1362 - RNA, 14 nt, synthetic construct
  variation 1..14: note = Description of Sequence: ASO sequence
  misc_feature 1..14: note = Note: the sequence may be DNA or RNA
  source 1..14: mol_type = other RNA
gaagcggaagacgt

SEQ ID NO: 1363 - RNA, 14 nt, synthetic construct
  variation 1..14: note = Description of Sequence: ASO sequence
  misc_feature 1..14: note = Note: the sequence may be DNA or RNA
  source 1..14: mol_type = other RNA
ggaagcggaagacg

SEQ ID NO: 1364 - RNA, 14 nt, synthetic construct
  variation 1..14: note = Description of Sequence: ASO sequence
  misc_feature 1..14: note = Note: the sequence may be DNA or RNA
  source 1..14: mol_type = other RNA
gggaagcggaagac

SEQ ID NO: 1365 - RNA, 14 nt, synthetic construct
  variation 1..14: note = Description of Sequence: ASO sequence
  misc_feature 1..14: note = Note: the sequence may be DNA or RNA
  source 1..14: mol_type = other RNA
agggaagcggaaga

SEQ ID NO: 1366 - RNA, 14 nt, synthetic construct
  variation 1..14: note = Description of Sequence: ASO sequence
  misc_feature 1..14: note = Note: the sequence may be DNA or RNA
  source 1..14: mol_type = other RNA
cagggaagcggaag

SEQ ID NO: 1367 - RNA, 14 nt, synthetic construct
  variation 1..14: note = Description of Sequence: ASO sequence
  misc_feature 1..14: note = Note: the sequence may be DNA or RNA
  source 1..14: mol_type = other RNA
ccagggaagcggaa

SEQ ID NO: 1368 - RNA, 14 nt, synthetic construct
  variation 1..14: note = Description of Sequence: ASO sequence
  misc_feature 1..14: note = Note: the sequence may be DNA or RNA
  source 1..14: mol_type = other RNA
gccagggaagcgga

SEQ ID NO: 1369 - RNA, 14 nt, synthetic construct
  variation 1..14: note = Description of Sequence: ASO sequence
  misc_feature 1..14: note = Note: the sequence may be DNA or RNA
  source 1..14: mol_type = other RNA
ggccagggaagcgg

SEQ ID NO: 1370 - RNA, 14 nt, synthetic construct
  variation 1..14: note = Description of Sequence: ASO sequence
  misc_feature 1..14: note = Note: the sequence may be DNA or RNA
  source 1..14: mol_type = other RNA
aggccagggaagcg

SEQ ID NO: 1371 - RNA, 14 nt, synthetic construct
  variation 1..14: note = Description of Sequence: ASO sequence
  misc_feature 1..14: note = Note: the sequence may be DNA or RNA
  source 1..14: mol_type = other RNA
aaggccagggaagc

SEQ ID NO: 1372 - RNA, 14 nt, synthetic construct
  variation 1..14: note = Description of Sequence: ASO sequence
  misc_feature 1..14: note = Note: the sequence may be DNA or RNA
  source 1..14: mol_type = other RNA
aaaggccagggaag

SEQ ID NO: 1373 - RNA, 14 nt, synthetic construct
  variation 1..14: note = Description of Sequence: ASO sequence
  misc_feature 1..14: note = Note: the sequence may be DNA or RNA
  source 1..14: mol_type = other RNA
caaaggccagggaa

SEQ ID NO: 1374 - RNA, 14 nt, synthetic construct
  variation 1..14: note = Description of Sequence: ASO sequence
  misc_feature 1..14: note = Note: the sequence may be DNA or RNA
  source 1..14: mol_type = other RNA
gcaaaggccaggga

SEQ ID NO: 1375 - RNA, 14 nt, synthetic construct
  variation 1..14: note = Description of Sequence: ASO sequence
  misc_feature 1..14: note = Note: the sequence may be DNA or RNA
  source 1..14: mol_type = other RNA
tgcaaaggccaggg

SEQ ID NO: 1376 - RNA, 14 nt, synthetic construct
  variation 1..14: note = Description of Sequence: ASO sequence
  misc_feature 1..14: note = Note: the sequence may be DNA or RNA
  source 1..14: mol_type = other RNA
ttgcaaaggccagg

SEQ ID NO: 1377 - RNA, 14 nt, synthetic construct
  variation 1..14: note = Description of Sequence: ASO sequence
  misc_feature 1..14: note = Note: the sequence may be DNA or RNA
  source 1..14: mol_type = other RNA
gttgcaaaggccag

SEQ ID NO: 1378 - RNA, 14 nt, synthetic construct
  variation 1..14: note = Description of Sequence: ASO sequence
  misc_feature 1..14: note = Note: the sequence may be DNA or RNA
  source 1..14: mol_type = other RNA
agttgcaaaggcca

SEQ ID NO: 1379 - RNA, 14 nt, synthetic construct
  variation 1..14: note = Description of Sequence: ASO sequence
  misc_feature 1..14: note = Note: the sequence may be DNA or RNA
  source 1..14: mol_type = other RNA
tagttgcaaaggcc

SEQ ID NO: 1380 - RNA, 14 nt, synthetic construct
  variation 1..14: note = Description of Sequence: ASO sequence
  misc_feature 1..14: note = Note: the sequence may be DNA or RNA
  source 1..14: mol_type = other RNA
gtagttgcaaaggc

SEQ ID NO: 1381 - RNA, 14 nt, synthetic construct
  variation 1..14: note = Description of Sequence: ASO sequence
  misc_feature 1..14: note = Note: the sequence may be DNA or RNA
  source 1..14: mol_type = other RNA
cgtagttgcaaagg

SEQ ID NO: 1382 - RNA, 14 nt, synthetic construct
  variation 1..14: note = Description of Sequence: ASO sequence
  misc_feature 1..14: note = Note: the sequence may be DNA or RNA
  source 1..14: mol_type = other RNA
acgtagttgcaaag

SEQ ID NO: 1383 - RNA, 14 nt, synthetic construct
  variation 1..14: note = Description of Sequence: ASO sequence
  misc_feature 1..14: note = Note: the sequence may be DNA or RNA
  source 1..14: mol_type = other RNA
cacgtagttgcaaa

SEQ ID NO: 1384 - RNA, 14 nt, synthetic construct
  variation 1..14: note = Description of Sequence: ASO sequence
  misc_feature 1..14: note = Note: the sequence may be DNA or RNA
  source 1..14: mol_type = other RNA
acacgtagttgcaa

SEQ ID NO: 1385 - RNA, 14 nt, synthetic construct
  variation 1..14: note = Description of Sequence: ASO sequence
  misc_feature 1..14: note = Note: the sequence may be DNA or RNA
  source 1..14: mol_type = other RNA
aacacgtagttgca

SEQ ID NO: 1386 - RNA, 14 nt, synthetic construct
  variation 1..14: note = Description of Sequence: ASO sequence
  misc_feature 1..14: note = Note: the sequence may be DNA or RNA
  source 1..14: mol_type = other RNA
gaacacgtagttgc

SEQ ID NO: 1387 - RNA, 14 nt, synthetic construct
  variation 1..14: note = Description of Sequence: ASO sequence
  misc_feature 1..14: note = Note: the sequence may be DNA or RNA
  source 1..14: mol_type = other RNA
agaacacgtagttg

SEQ ID NO: 1388 - RNA, 14 nt, synthetic construct
  variation 1..14: note = Description of Sequence: ASO sequence
  misc_feature 1..14: note = Note: the sequence may be DNA or RNA
  source 1..14: mol_type = other RNA
gagaacacgtagtt

SEQ ID NO: 1389 - RNA, 14 nt, synthetic construct
  variation 1..14: note = Description of Sequence: ASO sequence
  misc_feature 1..14: note = Note: the sequence may be DNA or RNA
  source 1..14: mol_type = other RNA
agagaacacgtagt

SEQ ID NO: 1390 - RNA, 14 nt, synthetic construct
  variation 1..14: note = Description of Sequence: ASO sequence
  misc_feature 1..14: note = Note: the sequence may be DNA or RNA
  source 1..14: mol_type = other RNA
cagagaacacgtag

SEQ ID NO: 1391 - RNA, 14 nt, synthetic construct
  variation 1..14: note = Description of Sequence: ASO sequence
  misc_feature 1..14: note = Note: the sequence may be DNA or RNA
  source 1..14: mol_type = other RNA
tcagagaacacgta

SEQ ID NO: 1392 - RNA, 14 nt, synthetic construct
  variation 1..14: note = Description of Sequence: ASO sequence
  misc_feature 1..14: note = Note: the sequence may be DNA or RNA
  source 1..14: mol_type = other RNA
ctcagagaacacgt

SEQ ID NO: 1393 - RNA, 14 nt, synthetic construct
  variation 1..14: note = Description of Sequence: ASO sequence
  misc_feature 1..14: note = Note: the sequence may be DNA or RNA
  source 1..14: mol_type = other RNA
gctcagagaacacg

SEQ ID NO: 1394 - RNA, 14 nt, synthetic construct
  variation 1..14: note = Description of Sequence: ASO sequence
  misc_feature 1..14: note = Note: the sequence may be DNA or RNA
  source 1..14: mol_type = other RNA
tgctcagagaacac

SEQ ID NO: 1395 - RNA, 14 nt, synthetic construct
  variation 1..14: note = Description of Sequence: ASO sequence
  misc_feature 1..14: note = Note: the sequence may be DNA or RNA
  source 1..14: mol_type = other RNA
gtgctcagagaaca

SEQ ID NO: 1396 - RNA, 14 nt, synthetic construct
  variation 1..14: note = Description of Sequence: ASO sequence
  misc_feature 1..14: note = Note: the sequence may be DNA or RNA
  source 1..14: mol_type = other RNA
agtgctcagagaac

SEQ ID NO: 1397 - RNA, 14 nt, synthetic construct
  variation 1..14: note = Description of Sequence: ASO sequence
  misc_feature 1..14: note = Note: the sequence may be DNA or RNA
  source 1..14: mol_type = other RNA
cagtgctcagagaa

SEQ ID NO: 1398 - RNA, 14 nt, synthetic construct
  variation 1..14: note = Description of Sequence: ASO sequence
  misc_feature 1..14: note = Note: the sequence may be DNA or RNA
  source 1..14: mol_type = other RNA
gcagtgctcagaga

SEQ ID NO: 1399 - RNA, 14 nt, synthetic construct
  variation 1..14: note = Description of Sequence: ASO sequence
  misc_feature 1..14: note = Note: the sequence may be DNA or RNA
  source 1..14: mol_type = other RNA
ggcagtgctcagag

SEQ ID NO: 1400 - RNA, 14 nt, synthetic construct
  variation 1..14: note = Description of Sequence: ASO sequence
  misc_feature 1..14: note = Note: the sequence may be DNA or RNA
  source 1..14: mol_type = other RNA
cggcagtgctcaga

SEQ ID NO: 1401 - RNA, 14 nt, synthetic construct
  variation 1..14: note = Description of Sequence: ASO sequence
  misc_feature 1..14: note = Note: the sequence may be DNA or RNA
  source 1..14: mol_type = other RNA
gcggcagtgctcag

SEQ ID NO: 1402 - RNA, 14 nt, synthetic construct
  variation 1..14: note = Description of Sequence: ASO sequence
  misc_feature 1..14: note = Note: the sequence may be DNA or RNA
  source 1..14: mol_type = other RNA
cgcggcagtgctca

SEQ ID NO: 1403 - RNA, 14 nt, synthetic construct
  variation 1..14: note = Description of Sequence: ASO sequence
  misc_feature 1..14: note = Note: the sequence may be DNA or RNA
  source 1..14: mol_type = other RNA
gcgcggcagtgctc

SEQ ID NO: 1404 - RNA, 14 nt, synthetic construct
  variation 1..14: note = Description of Sequence: ASO sequence
  misc_feature 1..14: note = Note: the sequence may be DNA or RNA
  source 1..14: mol_type = other RNA
ggcgcggcagtgct

SEQ ID NO: 1405 - RNA, 14 nt, synthetic construct
  variation 1..14: note = Description of Sequence: ASO sequence
  misc_feature 1..14: note = Note: the sequence may be DNA or RNA
  source 1..14: mol_type = other RNA
cggcgcggcagtgc

SEQ ID NO: 1406 - RNA, 14 nt, synthetic construct
  variation 1..14: note = Description of Sequence: ASO sequence
  misc_feature 1..14: note = Note: the sequence may be DNA or RNA
  source 1..14: mol_type = other RNA
gcggcgcggcagtg

SEQ ID NO: 1407 - RNA, 14 nt, synthetic construct
  variation 1..14: note = Description of Sequence: ASO sequence
  misc_feature 1..14: note = Note: the sequence may be DNA or RNA
  source 1..14: mol_type = other RNA
ggcggcgcggcagt

SEQ ID NO: 1408 - RNA, 14 nt, synthetic construct
  variation 1..14: note = Description of Sequence: ASO sequence
  misc_feature 1..14: note = Note: the sequence may be DNA or RNA
  source 1..14: mol_type = other RNA
aggcggcgcggcag

SEQ ID NO: 1409 - RNA, 14 nt, synthetic construct
  variation 1..14: note = Description of Sequence: ASO sequence
  misc_feature 1..14: note = Note: the sequence may be DNA or RNA
  source 1..14: mol_type = other RNA
taggcggcgcggca

SEQ ID NO: 1410 - RNA, 14 nt, synthetic construct
  variation 1..14: note = Description of Sequence: ASO sequence
  misc_feature 1..14: note = Note: the sequence may be DNA or RNA
  source 1..14: mol_type = other RNA
gtaggcggcgcggc

SEQ ID NO: 1411 - RNA, 14 nt, synthetic construct
  variation 1..14: note = Description of Sequence: ASO sequence
  misc_feature 1..14: note = Note: the sequence may be DNA or RNA
  source 1..14: mol_type = other RNA
cgtaggcggcgcgg

SEQ ID NO: 1412 - RNA, 14 nt, synthetic construct
  variation 1..14: note = Description of Sequence: ASO sequence
  misc_feature 1..14: note = Note: the sequence may be DNA or RNA
  source 1..14: mol_type = other RNA
tcgtaggcggcgcg

SEQ ID NO: 1413 - RNA, 14 nt, synthetic construct
  variation 1..14: note = Description of Sequence: ASO sequence
  misc_feature 1..14: note = Note: the sequence may be DNA or RNA
  source 1..14: mol_type = other RNA
ctcgtaggcggcgc

SEQ ID NO: 1414 - RNA, 14 nt, synthetic construct
  variation 1..14: note = Description of Sequence: ASO sequence
  misc_feature 1..14: note = Note: the sequence may be DNA or RNA
  source 1..14: mol_type = other RNA
cctcgtaggcggcg

SEQ ID NO: 1415 - RNA, 14 nt, synthetic construct
  variation 1..14: note = Description of Sequence: ASO sequence
  misc_feature 1..14: note = Note: the sequence may be DNA or RNA
  source 1..14: mol_type = other RNA
tcctcgtaggcggc

SEQ ID NO: 1416 - RNA, 14 nt, synthetic construct
  variation 1..14: note = Description of Sequence: ASO sequence
  misc_feature 1..14: note = Note: the sequence may be DNA or RNA
  source 1..14: mol_type = other RNA
gtcctcgtaggcgg

SEQ ID NO: 1417 - RNA, 14 nt, synthetic construct
  variation 1..14: note = Description of Sequence: ASO sequence
  misc_feature 1..14: note = Note: the sequence may be DNA or RNA
  source 1..14: mol_type = other RNA
agtcctcgtaggcg

SEQ ID NO: 1418 - RNA, 14 nt, synthetic construct
  variation 1..14: note = Description of Sequence: ASO sequence
  misc_feature 1..14: note = Note: the sequence may be DNA or RNA
  source 1..14: mol_type = other RNA
aagtcctcgtaggc

SEQ ID NO: 1419 - RNA, 14 nt, synthetic construct
  variation 1..14: note = Description of Sequence: ASO sequence
  misc_feature 1..14: note = Note: the sequence may be DNA or RNA
  source 1..14: mol_type = other RNA
gaagtcctcgtagg

SEQ ID NO: 1420 - RNA, 14 nt, synthetic construct
  variation 1..14: note = Description of Sequence: ASO sequence
  misc_feature 1..14: note = Note: the sequence may be DNA or RNA
  source 1..14: mol_type = other RNA
tgaagtcctcgtag

SEQ ID NO: 1421 - RNA, 14 nt, synthetic construct
  variation 1..14: note = Description of Sequence: ASO sequence
  misc_feature 1..14: note = Note: the sequence may be DNA or RNA
  source 1..14: mol_type = other RNA
ttgaagtcctcgta

SEQ ID NO: 1422 - RNA, 14 nt, synthetic construct
  variation 1..14: note = Description of Sequence: ASO sequence
  misc_feature 1..14: note = Note: the sequence may be DNA or RNA
  source 1..14: mol_type = other RNA
gttgaagtcctcgt

SEQ ID NO: 1423 - RNA, 14 nt, synthetic construct
  variation 1..14: note = Description of Sequence: ASO sequence
  misc_feature 1..14: note = Note: the sequence may be DNA or RNA
  source 1..14: mol_type = other RNA
cgttgaagtcctcg

SEQ ID NO: 1424 - RNA, 14 nt, synthetic construct
  variation 1..14: note = Description of Sequence: ASO sequence
  misc_feature 1..14: note = Note: the sequence may be DNA or RNA
  source 1..14: mol_type = other RNA
acgttgaagtcctc

SEQ ID NO: 1425 - RNA, 14 nt, synthetic construct
  variation 1..14: note = Description of Sequence: ASO sequence
  misc_feature 1..14: note = Note: the sequence may be DNA or RNA
  source 1..14: mol_type = other RNA
gacgttgaagtcct

SEQ ID NO: 1426 - RNA, 14 nt, synthetic construct
  variation 1..14: note = Description of Sequence: ASO sequence
  misc_feature 1..14: note = Note: the sequence may be DNA or RNA
  source 1..14: mol_type = other RNA
ggacgttgaagtcc

SEQ ID NO: 1427 - RNA, 14 nt, synthetic construct
  variation 1..14: note = Description of Sequence: ASO sequence
  misc_feature 1..14: note = Note: the sequence may be DNA or RNA
  source 1..14: mol_type = other RNA
tggacgttgaagtc

SEQ ID NO: 1428 - RNA, 14 nt, synthetic construct
  variation 1..14: note = Description of Sequence: ASO sequence
  misc_feature 1..14: note = Note: the sequence may be DNA or RNA
  source 1..14: mol_type = other RNA
ctggacgttgaagt

SEQ ID NO: 1429 - RNA, 14 nt, synthetic construct
  variation 1..14: note = Description of Sequence: ASO sequence
  misc_feature 1..14: note = Note: the sequence may be DNA or RNA
  source 1..14: mol_type = other RNA
gctggacgttgaag

SEQ ID NO: 1430 - RNA, 14 nt, synthetic construct
  variation 1..14: note = Description of Sequence: ASO sequence
  misc_feature 1..14: note = Note: the sequence may be DNA or RNA
  source 1..14: mol_type = other RNA
agctggacgttgaa

SEQ ID NO: 1431 - RNA, 14 nt, synthetic construct
  variation 1..14: note = Description of Sequence: ASO sequence
  misc_feature 1..14: note = Note: the sequence may be DNA or RNA
  source 1..14: mol_type = other RNA
tagctggacgttga

SEQ ID NO: 1432 - RNA, 14 nt, synthetic construct
  variation 1..14: note = Description of Sequence: ASO sequence
  misc_feature 1..14: note = Note: the sequence may be DNA or RNA
  source 1..14: mol_type = other RNA
gtagctggacgttg

SEQ ID NO: 1433 - RNA, 14 nt, synthetic construct
  variation 1..14: note = Description of Sequence: ASO sequence
  misc_feature 1..14: note = Note: the sequence may be DNA or RNA
  source 1..14: mol_type = other RNA
cgtagctggacgtt

SEQ ID NO: 1434 - RNA, 14 nt, synthetic construct
  variation 1..14: note = Description of Sequence: ASO sequence
  misc_feature 1..14: note = Note: the sequence may be DNA or RNA
  source 1..14: mol_type = other RNA
gcgtagctggacgt

SEQ ID NO: 1435 - RNA, 14 nt, synthetic construct
  variation 1..14: note = Description of Sequence: ASO sequence
  misc_feature 1..14: note = Note: the sequence may be DNA or RNA
  source 1..14: mol_type = other RNA
ggcgtagctggacg

SEQ ID NO: 1436 - RNA, 14 nt, synthetic construct
  variation 1..14: note = Description of Sequence: ASO sequence
  misc_feature 1..14: note = Note: the sequence may be DNA or RNA
  source 1..14: mol_type = other RNA
cggcgtagctggac

SEQ ID NO: 1437 - RNA, 14 nt, synthetic construct
  variation 1..14: note = Description of Sequence: ASO sequence
  misc_feature 1..14: note = Note: the sequence may be DNA or RNA
  source 1..14: mol_type = other RNA
tcggcgtagctgga

SEQ ID NO: 1438 - RNA, 14 nt, synthetic construct
  variation 1..14: note = Description of Sequence: ASO sequence
  misc_feature 1..14: note = Note: the sequence may be DNA or RNA
  source 1..14: mol_type = other RNA
ctcggcgtagctgg

SEQ ID NO: 1439 - RNA, 14 nt, synthetic construct
  variation 1..14: note = Description of Sequence: ASO sequence
  misc_feature 1..14: note = Note: the sequence may be DNA or RNA
  source 1..14: mol_type = other RNA
cctcggcgtagctg

SEQ ID NO: 1440 - RNA, 14 nt, synthetic construct
  variation 1..14: note = Description of Sequence: ASO sequence
  misc_feature 1..14: note = Note: the sequence may be DNA or RNA
  source 1..14: mol_type = other RNA
gcctcggcgtagct

SEQ ID NO: 1441 - RNA, 14 nt, synthetic construct
  variation 1..14: note = Description of Sequence: ASO sequence
  misc_feature 1..14: note = Note: the sequence may be DNA or RNA
  source 1..14: mol_type = other RNA
ggcctcggcgtagc

SEQ ID NO: 1442 - RNA, 14 nt, synthetic construct
  variation 1..14: note = Description of Sequence: ASO sequence
  misc_feature 1..14: note = Note: the sequence may be DNA or RNA
  source 1..14: mol_type = other RNA
aggcctcggcgtag

SEQ ID NO: 1443 - RNA, 14 nt, synthetic construct
  variation 1..14: note = Description of Sequence: ASO sequence
  misc_feature 1..14: note = Note: the sequence may be DNA or RNA
  source 1..14: mol_type = other RNA
taggcctcggcgta

SEQ ID NO: 1444 - RNA, 14 nt, synthetic construct
  variation 1..14: note = Description of Sequence: ASO sequence
  misc_feature 1..14: note = Note: the sequence may be DNA or RNA
  source 1..14: mol_type = other RNA
ctaggcctcggcgt

SEQ ID NO: 1445 - RNA, 14 nt, synthetic construct
  variation 1..14: note = Description of Sequence: ASO sequence
  misc_feature 1..14: note = Note: the sequence may be DNA or RNA
  source 1..14: mol_type = other RNA
actaggcctcggcg

SEQ ID NO: 1446 - RNA, 14 nt, synthetic construct
  variation 1..14: note = Description of Sequence: ASO sequence
  misc_feature 1..14: note = Note: the sequence may be DNA or RNA
  source 1..14: mol_type = other RNA
cactaggcctcggc

SEQ ID NO: 1447 - RNA, 14 nt, synthetic construct
  variation 1..14: note = Description of Sequence: ASO sequence
  misc_feature 1..14: note = Note: the sequence may be DNA or RNA
  source 1..14: mol_type = other RNA
ccactaggcctcgg

SEQ ID NO: 1448 - RNA, 14 nt, synthetic construct
  variation 1..14: note = Description of Sequence: ASO sequence
  misc_feature 1..14: note = Note: the sequence may be DNA or RNA
  source 1..14: mol_type = other RNA
cccactaggcctcg

SEQ ID NO: 1449 - RNA, 14 nt, synthetic construct
  variation 1..14: note = Description of Sequence: ASO sequence
  misc_feature 1..14: note = Note: the sequence may be DNA or RNA
  source 1..14: mol_type = other RNA
gcccactaggcctc

SEQ ID NO: 1450 - RNA, 14 nt, synthetic construct
  variation 1..14: note = Description of Sequence: ASO sequence
  misc_feature 1..14: note = Note: the sequence may be DNA or RNA
  source 1..14: mol_type = other RNA
agcccactaggcct

SEQ ID NO: 1451 - RNA, 14 nt, synthetic construct
  variation 1..14: note = Description of Sequence: ASO sequence
  misc_feature 1..14: note = Note: the sequence may be DNA or RNA
  source 1..14: mol_type = other RNA
gagcccactaggcc

SEQ ID NO: 1452 - RNA, 14 nt, synthetic construct
  variation 1..14: note = Description of Sequence: ASO sequence
  misc_feature 1..14: note = Note: the sequence may be DNA or RNA
  source 1..14: mol_type = other RNA
ggagcccactaggc

SEQ ID NO: 1453 - RNA, 14 nt, synthetic construct
  variation 1..14: note = Description of Sequence: ASO sequence
  misc_feature 1..14: note = Note: the sequence may be DNA or RNA
  source 1..14: mol_type = other RNA
tggagcccactagg

SEQ ID NO: 1454 - RNA, 14 nt, synthetic construct
  variation 1..14: note = Description of Sequence: ASO sequence
  misc_feature 1..14: note = Note: the sequence may be DNA or RNA
  source 1..14: mol_type = other RNA
ctggagcccactag

SEQ ID NO: 1455 - RNA, 14 nt, synthetic construct
  variation 1..14: note = Description of Sequence: ASO sequence
  misc_feature 1..14: note = Note: the sequence may be DNA or RNA
  source 1..14: mol_type = other RNA
cctggagcccacta

SEQ ID NO: 1456 - RNA, 14 nt, synthetic construct
  variation 1..14: note = Description of Sequence: ASO sequence
  misc_feature 1..14: note = Note: the sequence may be DNA or RNA
  source 1..14: mol_type = other RNA
gcctggagcccact

SEQ ID NO: 1457 - RNA, 14 nt, synthetic construct
  variation 1..14: note = Description of Sequence: ASO sequence
  misc_feature 1..14: note = Note: the sequence may be DNA or RNA
  source 1..14: mol_type = other RNA
ggcctggagcccac

SEQ ID NO: 1458 - RNA, 14 nt, synthetic construct
  variation 1..14: note = Description of Sequence: ASO sequence
  misc_feature 1..14: note = Note: the sequence may be DNA or RNA
  source 1..14: mol_type = other RNA
aggcctggagccca

SEQ ID NO: 1459 - RNA, 14 nt, synthetic construct
  variation 1..14: note = Description of Sequence: ASO sequence
  misc_feature 1..14: note = Note: the sequence may be DNA or RNA
  source 1..14: mol_type = other RNA
caggcctggagccc

SEQ ID NO: 1460 - RNA, 14 nt, synthetic construct
  variation 1..14: note = Description of Sequence: ASO sequence
  misc_feature 1..14: note = Note: the sequence may be DNA or RNA
  source 1..14: mol_type = other RNA
acaggcctggagcc

SEQ ID NO: 1461 - RNA, 14 nt, synthetic construct
  variation 1..14: note = Description of Sequence: ASO sequence
  misc_feature 1..14: note = Note: the sequence may be DNA or RNA
  source 1..14: mol_type = other RNA
cacaggcctggagc

SEQ ID NO: 1462 - RNA, 14 nt, synthetic construct
  variation 1..14: note = Description of Sequence: ASO sequence
  misc_feature 1..14: note = Note: the sequence may be DNA or RNA
  source 1..14: mol_type = other RNA
ccacaggcctggag

SEQ ID NO: 1463 - RNA, 14 nt, synthetic construct
  variation 1..14: note = Description of Sequence: ASO sequence
  misc_feature 1..14: note = Note: the sequence may be DNA or RNA
  source 1..14: mol_type = other RNA
accacaggcctgga

SEQ ID NO: 1464 - RNA, 14 nt, synthetic construct
  variation 1..14: note = Description of Sequence: ASO sequence
  misc_feature 1..14: note = Note: the sequence may be DNA or RNA
  source 1..14: mol_type = other RNA
gaccacaggcctgg

SEQ ID NO: 1465 - RNA, 14 nt, synthetic construct
  variation 1..14: note = Description of Sequence: ASO sequence
  misc_feature 1..14: note = Note: the sequence may be DNA or RNA
  source 1..14: mol_type = other RNA
tgaccacaggcctg

SEQ ID NO: 1466 - RNA, 14 nt, synthetic construct
  variation 1..14: note = Description of Sequence: ASO sequence
  misc_feature 1..14: note = Note: the sequence may be DNA or RNA
  source 1..14: mol_type = other RNA
gtgaccacaggcct

SEQ ID NO: 1467 - RNA, 14 nt, synthetic construct
  variation 1..14: note = Description of Sequence: ASO sequence
  misc_feature 1..14: note = Note: the sequence may be DNA or RNA
  source 1..14: mol_type = other RNA
ggtgaccacaggcc

SEQ ID NO: 1468 - RNA, 14 nt, synthetic construct
  variation 1..14: note = Description of Sequence: ASO sequence
  misc_feature 1..14: note = Note: the sequence may be DNA or RNA
  source 1..14: mol_type = other RNA
gggtgaccacaggc

SEQ ID NO: 1469 - RNA, 14 nt, synthetic construct
  variation 1..14: note = Description of Sequence: ASO sequence
  misc_feature 1..14: note = Note: the sequence may be DNA or RNA
  source 1..14: mol_type = other RNA
cgggtgaccacagg

SEQ ID NO: 1470 - RNA, 14 nt, synthetic construct
  variation 1..14: note = Description of Sequence: ASO sequence
  misc_feature 1..14: note = Note: the sequence may be DNA or RNA
  source 1..14: mol_type = other RNA
acgggtgaccacag

SEQ ID NO: 1471 - RNA, 14 nt, synthetic construct
  variation 1..14: note = Description of Sequence: ASO sequence
  misc_feature 1..14: note = Note: the sequence may be DNA or RNA
  source 1..14: mol_type = other RNA
cacgggtgaccaca

SEQ ID NO: 1472 - RNA, 14 nt, synthetic construct
  variation 1..14: note = Description of Sequence: ASO sequence
  misc_feature 1..14: note = Note: the sequence may be DNA or RNA
  source 1..14: mol_type = other RNA
acacgggtgaccac

SEQ ID NO: 1473 - RNA, 14 nt, synthetic construct
  variation 1..14: note = Description of Sequence: ASO sequence
  misc_feature 1..14: note = Note: the sequence may be DNA or RNA
  source 1..14: mol_type = other RNA
aacacgggtgacca

SEQ ID NO: 1474 - RNA, 14 nt, synthetic construct
  variation 1..14: note = Description of Sequence: ASO sequence
  misc_feature 1..14: note = Note: the sequence may be DNA or RNA
  source 1..14: mol_type = other RNA
caacacgggtgacc

SEQ ID NO: 1475 - RNA, 14 nt, synthetic construct
  variation 1..14: note = Description of Sequence: ASO sequence
  misc_feature 1..14: note = Note: the sequence may be DNA or RNA
  source 1..14: mol_type = other RNA
acaacacgggtgac

SEQ ID NO: 1476 - RNA, 14 nt, synthetic construct
  variation 1..14: note = Description of Sequence: ASO sequence
  misc_feature 1..14: note = Note: the sequence may be DNA or RNA
  source 1..14: mol_type = other RNA
gacaacacgggtga

SEQ ID NO: 1477 - RNA, 14 nt, synthetic construct
  variation 1..14: note = Description of Sequence: ASO sequence
  misc_feature 1..14: note = Note: the sequence may be DNA or RNA
  source 1..14: mol_type = other RNA
tgacaacacgggtg

SEQ ID NO: 1478 - RNA, 14 nt, synthetic construct
  variation 1..14: note = Description of Sequence: ASO sequence
  misc_feature 1..14: note = Note: the sequence may be DNA or RNA
  source 1..14: mol_type = other RNA
atgacaacacgggt

SEQ ID NO: 1479 - RNA, 14 nt, synthetic construct
  variation 1..14: note = Description of Sequence: ASO sequence
  misc_feature 1..14: note = Note: the sequence may be DNA or RNA
  source 1..14: mol_type = other RNA
gatgacaacacggg

SEQ ID NO: 1480 - RNA, 14 nt, synthetic construct
  variation 1..14: note = Description of Sequence: ASO sequence
  misc_feature 1..14: note = Note: the sequence may be DNA or RNA
  source 1..14: mol_type = other RNA
tgatgacaacacgg

SEQ ID NO: 1481 - RNA, 14 nt, synthetic construct
  variation 1..14: note = Description of Sequence: ASO sequence
  misc_feature 1..14: note = Note: the sequence may be DNA or RNA
  source 1..14: mol_type = other RNA
ttgatgacaacacg

SEQ ID NO: 1482 - RNA, 14 nt, synthetic construct
  variation 1..14: note = Description of Sequence: ASO sequence
  misc_feature 1..14: note = Note: the sequence may be DNA or RNA
  source 1..14: mol_type = other RNA
cttgatgacaacac

SEQ ID NO: 1483 - RNA, 14 nt, synthetic construct
  variation 1..14: note = Description of Sequence: ASO sequence
  misc_feature 1..14: note = Note: the sequence may be DNA or RNA
  source 1..14: mol_type = other RNA
ccttgatgacaaca

SEQ ID NO: 1484 - RNA, 14 nt, synthetic construct
  variation 1..14: note = Description of Sequence: ASO sequence
  misc_feature 1..14: note = Note: the sequence may be DNA or RNA
  source 1..14: mol_type = other RNA
gccttgatgacaac

SEQ ID NO: 1485 - RNA, 14 nt, synthetic construct
  variation 1..14: note = Description of Sequence: ASO sequence
  misc_feature 1..14: note = Note: the sequence may be DNA or RNA
  source 1..14: mol_type = other RNA
ggccttgatgacaa

SEQ ID NO: 1486 - RNA, 14 nt, synthetic construct
  variation 1..14: note = Description of Sequence: ASO sequence
  misc_feature 1..14: note = Note: the sequence may be DNA or RNA
  source 1..14: mol_type = other RNA
gggccttgatgaca

SEQ ID NO: 1487 - RNA, 14 nt, synthetic construct
  variation 1..14: note = Description of Sequence: ASO sequence
  misc_feature 1..14: note = Note: the sequence may be DNA or RNA
  source 1..14: mol_type = other RNA
tgggccttgatgac

SEQ ID NO: 1488 - RNA, 14 nt, synthetic construct
  variation 1..14: note = Description of Sequence: ASO sequence
  misc_feature 1..14: note = Note: the sequence may be DNA or RNA
  source 1..14: mol_type = other RNA
ctgggccttgatga

SEQ ID NO: 1489 - RNA, 14 nt, synthetic construct
  variation 1..14: note = Description of Sequence: ASO sequence
  misc_feature 1..14: note = Note: the sequence may be DNA or RNA
  source 1..14: mol_type = other RNA
cctgggccttgatg

SEQ ID NO: 1490 - RNA, 14 nt, synthetic construct
  variation 1..14: note = Description of Sequence: ASO sequence
  misc_feature 1..14: note = Note: the sequence may be DNA or RNA
  source 1..14: mol_type = other RNA
ccctgggccttgat

SEQ ID NO: 1491 - RNA, 14 nt, synthetic construct
  variation 1..14: note = Description of Sequence: ASO sequence
  misc_feature 1..14: note = Note: the sequence may be DNA or RNA
  source 1..14: mol_type = other RNA
cccctgggccttga

SEQ ID NO: 1492 - RNA, 14 nt, synthetic construct
  variation 1..14: note = Description of Sequence: ASO sequence
  misc_feature 1..14: note = Note: the sequence may be DNA or RNA
  source 1..14: mol_type = other RNA
gcccctgggccttg

SEQ ID NO: 1493 - RNA, 14 nt, synthetic construct
  variation 1..14: note = Description of Sequence: ASO sequence
  misc_feature 1..14: note = Note: the sequence may be DNA or RNA
  source 1..14: mol_type = other RNA
agcccctgggcctt

SEQ ID NO: 1494 - RNA, 14 nt, synthetic construct
  variation 1..14: note = Description of Sequence: ASO sequence
  misc_feature 1..14: note = Note: the sequence may be DNA or RNA
  source 1..14: mol_type = other RNA
cagcccctgggcct

SEQ ID NO: 1495 - RNA, 14 nt, synthetic construct
  variation 1..14: note = Description of Sequence: ASO sequence
  misc_feature 1..14: note = Note: the sequence may be DNA or RNA
  source 1..14: mol_type = other RNA
ccagcccctgggcc

SEQ ID NO: 1496 - RNA, 14 nt, synthetic construct
  variation 1..14: note = Description of Sequence: ASO sequence
  misc_feature 1..14: note = Note: the sequence may be DNA or RNA
  source 1..14: mol_type = other RNA
accagcccctgggc

SEQ ID NO: 1497 - RNA, 14 nt, synthetic construct
  variation 1..14: note = Description of Sequence: ASO sequence
  misc_feature 1..14: note = Note: the sequence may be DNA or RNA
  source 1..14: mol_type = other RNA
caccagcccctggg

SEQ ID NO: 1498 - RNA, 14 nt, synthetic construct
  variation 1..14: note = Description of Sequence: ASO sequence
  misc_feature 1..14: note = Note: the sequence may be DNA or RNA
  source 1..14: mol_type = other RNA
gcaccagcccctgg

SEQ ID NO: 1499 - RNA, 14 nt, synthetic construct
  variation 1..14: note = Description of Sequence: ASO sequence
  misc_feature 1..14: note = Note: the sequence may be DNA or RNA
  source 1..14: mol_type = other RNA
agcaccagcccctg

SEQ ID NO: 1500 - RNA, 14 nt, synthetic construct
  variation 1..14: note = Description of Sequence: ASO sequence
  misc_feature 1..14: note = Note: the sequence may be DNA or RNA
  source 1..14: mol_type = other RNA
cagcaccagcccct

SEQ ID NO: 1501 - RNA, 14 nt, synthetic construct
  variation 1..14: note = Description of Sequence: ASO sequence
  misc_feature 1..14: note = Note: the sequence may be DNA or RNA
  source 1..14: mol_type = other RNA
ccagcaccagcccc

SEQ ID NO: 1502 - RNA, 14 nt, synthetic construct
  variation 1..14: note = Description of Sequence: ASO sequence
  misc_feature 1..14: note = Note: the sequence may be DNA or RNA
  source 1..14: mol_type = other RNA
tccagcaccagccc

SEQ ID NO: 1503 - RNA, 14 nt, synthetic construct
  variation 1..14: note = Description of Sequence: ASO sequence
  misc_feature 1..14: note = Note: the sequence may be DNA or RNA
  source 1..14: mol_type = other RNA
ctccagcaccagcc

SEQ ID NO: 1504 - RNA, 14 nt, synthetic construct
  variation 1..14: note = Description of Sequence: ASO sequence
  misc_feature 1..14: note = Note: the sequence may be DNA or RNA
  source 1..14: mol_type = other RNA
cctccagcaccagc

SEQ ID NO: 1505 - RNA, 14 nt, synthetic construct
  variation 1..14: note = Description of Sequence: ASO sequence
  misc_feature 1..14: note = Note: the sequence may be DNA or RNA
  source 1..14: mol_type = other RNA
gcctccagcaccag

SEQ ID NO: 1506 - RNA, 14 nt, synthetic construct
  variation 1..14: note = Description of Sequence: ASO sequence
  misc_feature 1..14: note = Note: the sequence may be DNA or RNA
  source 1..14: mol_type = other RNA
cgcctccagcacca

SEQ ID NO: 1507 - RNA, 14 nt, synthetic construct
  variation 1..14: note = Description of Sequence: ASO sequence
  misc_feature 1..14: note = Note: the sequence may be DNA or RNA
  source 1..14: mol_type = other RNA
acgcctccagcacc

SEQ ID NO: 1508 - RNA, 14 nt, synthetic construct
  variation 1..14: note = Description of Sequence: ASO sequence
  misc_feature 1..14: note = Note: the sequence may be DNA or RNA
  source 1..14: mol_type = other RNA
gacgcctccagcac

SEQ ID NO: 1509 - RNA, 14 nt, synthetic construct
  variation 1..14: note = Description of Sequence: ASO sequence
  misc_feature 1..14: note = Note: the sequence may be DNA or RNA
  source 1..14: mol_type = other RNA
ggacgcctccagca

SEQ ID NO: 1510 - RNA, 14 nt, synthetic construct
  variation 1..14: note = Description of Sequence: ASO sequence
  misc_feature 1..14: note = Note: the sequence may be DNA or RNA
  source 1..14: mol_type = other RNA
tggacgcctccagc

SEQ ID NO: 1511 - RNA, 14 nt, synthetic construct
  variation 1..14: note = Description of Sequence: ASO sequence
  misc_feature 1..14: note = Note: the sequence may be DNA or RNA
  source 1..14: mol_type = other RNA
ttggacgcctccag

SEQ ID NO: 1512 - RNA, 14 nt, synthetic construct
  variation 1..14: note = Description of Sequence: ASO sequence
  misc_feature 1..14: note = Note: the sequence may be DNA or RNA
  source 1..14: mol_type = other RNA
gttggacgcctcca

SEQ ID NO: 1513 - RNA, 14 nt, synthetic construct
  variation 1..14: note = Description of Sequence: ASO sequence
  misc_feature 1..14: note = Note: the sequence may be DNA or RNA
  source 1..14: mol_type = other RNA
cgttggacgcctcc

SEQ ID NO: 1514 - RNA, 14 nt, synthetic construct
  variation 1..14: note = Description of Sequence: ASO sequence
  misc_feature 1..14: note = Note: the sequence may be DNA or RNA
  source 1..14: mol_type = other RNA
ccgttggacgcctc

SEQ ID NO: 1515 - RNA, 14 nt, synthetic construct
  variation 1..14: note = Description of Sequence: ASO sequence
  misc_feature 1..14: note = Note: the sequence may be DNA or RNA
  source 1..14: mol_type = other RNA
gccgttggacgcct

SEQ ID NO: 1516 - RNA, 14 nt, synthetic construct
  variation 1..14: note = Description of Sequence: ASO sequence
  misc_feature 1..14: note = Note: the sequence may be DNA or RNA
  source 1..14: mol_type = other RNA
agccgttggacgcc

SEQ ID NO: 1517 - RNA, 14 nt, synthetic construct
  variation 1..14: note = Description of Sequence: ASO sequence
  misc_feature 1..14: note = Note: the sequence may be DNA or RNA
  source 1..14: mol_type = other RNA
gagccgttggacgc

SEQ ID NO: 1518 - RNA, 14 nt, synthetic construct
  variation 1..14: note = Description of Sequence: ASO sequence
  misc_feature 1..14: note = Note: the sequence may be DNA or RNA
  source 1..14: mol_type = other RNA
ggagccgttggacg

SEQ ID NO: 1519 - RNA, 14 nt, synthetic construct
  variation 1..14: note = Description of Sequence: ASO sequence
  misc_feature 1..14: note = Note: the sequence may be DNA or RNA
  source 1..14: mol_type = other RNA
cggagccgttggac

SEQ ID NO: 1520 - RNA, 14 nt, synthetic construct
  variation 1..14: note = Description of Sequence: ASO sequence
  misc_feature 1..14: note = Note: the sequence may be DNA or RNA
  source 1..14: mol_type = other RNA
acggagccgttgga

SEQ ID NO: 1521 - RNA, 14 nt, synthetic construct
  variation 1..14: note = Description of Sequence: ASO sequence
  misc_feature 1..14: note = Note: the sequence may be DNA or RNA
  source 1..14: mol_type = other RNA
gacggagccgttgg

SEQ ID NO: 1522 - RNA, 14 nt, synthetic construct
  variation 1..14: note = Description of Sequence: ASO sequence
  misc_feature 1..14: note = Note: the sequence may be DNA or RNA
  source 1..14: mol_type = other RNA
ggacggagccgttg

SEQ ID NO: 1523 - RNA, 14 nt, synthetic construct
  variation 1..14: note = Description of Sequence: ASO sequence
  misc_feature 1..14: note = Note: the sequence may be DNA or RNA
  source 1..14: mol_type = other RNA
aggacggagccgtt

SEQ ID NO: 1524 - RNA, 14 nt, synthetic construct
  variation 1..14: note = Description of Sequence: ASO sequence
  misc_feature 1..14: note = Note: the sequence may be DNA or RNA
  source 1..14: mol_type = other RNA
gaggacggagccgt

SEQ ID NO: 1525 - RNA, 14 nt, synthetic construct
  variation 1..14: note = Description of Sequence: ASO sequence
  misc_feature 1..14: note = Note: the sequence may be DNA or RNA
  source 1..14: mol_type = other RNA
tgaggacggagccg

SEQ ID NO: 1526 - RNA, 14 nt, synthetic construct
  variation 1..14: note = Description of Sequence: ASO sequence
  misc_feature 1..14: note = Note: the sequence may be DNA or RNA
  source 1..14: mol_type = other RNA
atgaggacggagcc

SEQ ID NO: 1527 - RNA, 14 nt, synthetic construct
  variation 1..14: note = Description of Sequence: ASO sequence
  misc_feature 1..14: note = Note: the sequence may be DNA or RNA
  source 1..14: mol_type = other RNA
gatgaggacggagc

SEQ ID NO: 1528 - RNA, 14 nt, synthetic construct
  variation 1..14: note = Description of Sequence: ASO sequence
  misc_feature 1..14: note = Note: the sequence may be DNA or RNA
  source 1..14: mol_type = other RNA
tgatgaggacggag

SEQ ID NO: 1529 - RNA, 14 nt, synthetic construct
  variation 1..14: note = Description of Sequence: ASO sequence
  misc_feature 1..14: note = Note: the sequence may be DNA or RNA
  source 1..14: mol_type = other RNA
ttgatgaggacgga

SEQ ID NO: 1530 - RNA, 14 nt, synthetic construct
  variation 1..14: note = Description of Sequence: ASO sequence
  misc_feature 1..14: note = Note: the sequence may be DNA or RNA
  source 1..14: mol_type = other RNA
attgatgaggacgg

SEQ ID NO: 1531 - RNA, 14 nt, synthetic construct
  variation 1..14: note = Description of Sequence: ASO sequence
  misc_feature 1..14: note = Note: the sequence may be DNA or RNA
  source 1..14: mol_type = other RNA
cattgatgaggacg

SEQ ID NO: 1532 - RNA, 14 nt, synthetic construct
  variation 1..14: note = Description of Sequence: ASO sequence
  misc_feature 1..14: note = Note: the sequence may be DNA or RNA
  source 1..14: mol_type = other RNA
ccattgatgaggac

SEQ ID NO: 1533 - RNA, 14 nt, synthetic construct
  variation 1..14: note = Description of Sequence: ASO sequence
  misc_feature 1..14: note = Note: the sequence may be DNA or RNA
  source 1..14: mol_type = other RNA
cccattgatgagga

SEQ ID NO: 1534 - RNA, 14 nt, synthetic construct
  variation 1..14: note = Description of Sequence: ASO sequence
  misc_feature 1..14: note = Note: the sequence may be DNA or RNA
  source 1..14: mol_type = other RNA
gcccattgatgagg

SEQ ID NO: 1535 - RNA, 14 nt, synthetic construct
  variation 1..14: note = Description of Sequence: ASO sequence
  misc_feature 1..14: note = Note: the sequence may be DNA or RNA
  source 1..14: mol_type = other RNA
tgcccattgatgag

SEQ ID NO: 1536 - RNA, 14 nt, synthetic construct
  variation 1..14: note = Description of Sequence: ASO sequence
  misc_feature 1..14: note = Note: the sequence may be DNA or RNA
  source 1..14: mol_type = other RNA
ctgcccattgatga

SEQ ID NO: 1537 - RNA, 14 nt, synthetic construct
  variation 1..14: note = Description of Sequence: ASO sequence
  misc_feature 1..14: note = Note: the sequence may be DNA or RNA
  source 1..14: mol_type = other RNA
gctgcccattgatg

SEQ ID NO: 1538 - RNA, 14 nt, synthetic construct
  variation 1..14: note = Description of Sequence: ASO sequence
  misc_feature 1..14: note = Note: the sequence may be DNA or RNA
  source 1..14: mol_type = other RNA
cgctgcccattgat

SEQ ID NO: 1539 - RNA, 14 nt, synthetic construct
  variation 1..14: note = Description of Sequence: ASO sequence
  misc_feature 1..14: note = Note: the sequence may be DNA or RNA
  source 1..14: mol_type = other RNA
aaggcagctcctcc

SEQ ID NO: 1540 - RNA, 14 nt, synthetic construct
  variation 1..14: note = Description of Sequence: ASO sequence
  misc_feature 1..14: note = Note: the sequence may be DNA or RNA
  source 1..14: mol_type = other RNA
taaggcagctcctc

SEQ ID NO: 1541 - RNA, 14 nt, synthetic construct
  variation 1..14: note = Description of Sequence: ASO sequence
  misc_feature 1..14: note = Note: the sequence may be DNA or RNA
  source 1..14: mol_type = other RNA
gtaaggcagctcct

SEQ ID NO: 1542 - RNA, 14 nt, synthetic construct
  variation 1..14: note = Description of Sequence: ASO sequence
  misc_feature 1..14: note = Note: the sequence may be DNA or RNA
  source 1..14: mol_type = other RNA
tgtaaggcagctcc

SEQ ID NO: 1543 - RNA, 14 nt, synthetic construct
  variation 1..14: note = Description of Sequence: ASO sequence
  misc_feature 1..14: note = Note: the sequence may be DNA or RNA
  source 1..14: mol_type = other RNA
ctgtaaggcagctc

SEQ ID NO: 1544 - RNA, 14 nt, synthetic construct
  variation 1..14: note = Description of Sequence: ASO sequence
  misc_feature 1..14: note = Note: the sequence may be DNA or RNA
  source 1..14: mol_type = other RNA
gctgtaaggcagct

SEQ ID NO: 1545 - RNA, 14 nt, synthetic construct
  variation 1..14: note = Description of Sequence: ASO sequence
  misc_feature 1..14: note = Note: the sequence may be DNA or RNA
  source 1..14: mol_type = other RNA
ggctgtaaggcagc

SEQ ID NO: 1546 - RNA, 14 nt, synthetic construct
  variation 1..14: note = Description of Sequence: ASO sequence
  misc_feature 1..14: note = Note: the sequence may be DNA or RNA
  source 1..14: mol_type = other RNA
cggctgtaaggcag

SEQ ID NO: 1547 - RNA, 14 nt, synthetic construct
  variation 1..14: note = Description of Sequence: ASO sequence
  misc_feature 1..14: note = Note: the sequence may be DNA or RNA
  source 1..14: mol_type = other RNA
gcggctgtaaggca

SEQ ID NO: 1548 - RNA, 14 nt, synthetic construct
  variation 1..14: note = Description of Sequence: ASO sequence
  misc_feature 1..14: note = Note: the sequence may be DNA or RNA
  source 1..14: mol_type = other RNA
tgcggctgtaaggc

SEQ ID NO: 1549 - RNA, 14 nt, synthetic construct
  variation 1..14: note = Description of Sequence: ASO sequence
  misc_feature 1..14: note = Note: the sequence may be DNA or RNA
  source 1..14: mol_type = other RNA
gtgcggctgtaagg

SEQ ID NO: 1550 - RNA, 14 nt, synthetic construct
  variation 1..14: note = Description of Sequence: ASO sequence
  misc_feature 1..14: note = Note: the sequence may be DNA or RNA
  source 1..14: mol_type = other RNA
agtgcggctgtaag

SEQ ID NO: 1551 - RNA, 14 nt, synthetic construct
  variation 1..14: note = Description of Sequence: ASO sequence
  misc_feature 1..14: note = Note: the sequence may be DNA or RNA
  source 1..14: mol_type = other RNA
cagtgcggctgtaa

SEQ ID NO: 1552 - RNA, 14 nt, synthetic construct
  variation 1..14: note = Description of Sequence: ASO sequence
  misc_feature 1..14: note = Note: the sequence may be DNA or RNA
  source 1..14: mol_type = other RNA
ccagtgcggctgta

SEQ ID NO: 1553 - RNA, 14 nt, synthetic construct
  variation 1..14: note = Description of Sequence: ASO sequence
  misc_feature 1..14: note = Note: the sequence may be DNA or RNA
  source 1..14: mol_type = other RNA
gccagtgcggctgt

SEQ ID NO: 1554 - RNA, 14 nt, synthetic construct
  variation 1..14: note = Description of Sequence: ASO sequence
  misc_feature 1..14: note = Note: the sequence may be DNA or RNA
  source 1..14: mol_type = other RNA
ggccagtgcggctg

SEQ ID NO: 1555 - RNA, 14 nt, synthetic construct
  variation 1..14: note = Description of Sequence: ASO sequence
  misc_feature 1..14: note = Note: the sequence may be DNA or RNA
  source 1..14: mol_type = other RNA
aggccagtgcggct

SEQ ID NO: 1556 - RNA, 14 nt, synthetic construct
  variation 1..14: note = Description of Sequence: ASO sequence
  misc_feature 1..14: note = Note: the sequence may be DNA or RNA
  source 1..14: mol_type = other RNA
gaggccagtgcggc

SEQ ID NO: 1557 - RNA, 14 nt, synthetic construct
  variation 1..14: note = Description of Sequence: ASO sequence
  misc_feature 1..14: note = Note: the sequence may be DNA or RNA
  source 1..14: mol_type = other RNA
ggaggccagtgcgg

SEQ ID NO: 1558 - RNA, 14 nt, synthetic construct
  variation 1..14: note = Description of Sequence: ASO sequence
  misc_feature 1..14: note = Note: the sequence may be DNA or RNA
  source 1..14: mol_type = other RNA
aggaggccagtgcg

SEQ ID NO: 1559 - RNA, 14 nt, synthetic construct
  variation 1..14: note = Description of Sequence: ASO sequence
  misc_feature 1..14: note = Note: the sequence may be DNA or RNA
  source 1..14: mol_type = other RNA
caggaggccagtgc

SEQ ID NO: 1560 - RNA, 14 nt, synthetic construct
  variation 1..14: note = Description of Sequence: ASO sequence
  misc_feature 1..14: note = Note: the sequence may be DNA or RNA
  source 1..14: mol_type = other RNA
ccaggaggccagtg

SEQ ID NO: 1561 - RNA, 14 nt, synthetic construct
  variation 1..14: note = Description of Sequence: ASO sequence
  misc_feature 1..14: note = Note: the sequence may be DNA or RNA
  source 1..14: mol_type = other RNA
accaggaggccagt

SEQ ID NO: 1562 - RNA, 14 nt, synthetic construct
  variation 1..14: note = Description of Sequence: ASO sequence
  misc_feature 1..14: note = Note: the sequence may be DNA or RNA
  source 1..14: mol_type = other RNA
caccaggaggccag

SEQ ID NO: 1563 - RNA, 14 nt, synthetic construct
  variation 1..14: note = Description of Sequence: ASO sequence
  misc_feature 1..14: note = Note: the sequence may be DNA or RNA
  source 1..14: mol_type = other RNA
ccaccaggaggcca

SEQ ID NO: 1564 - RNA, 14 nt, synthetic construct
  variation 1..14: note = Description of Sequence: ASO sequence
  misc_feature 1..14: note = Note: the sequence may be DNA or RNA
  source 1..14: mol_type = other RNA
tccaccaggaggcc

SEQ ID NO: 1565 - RNA, 14 nt, synthetic construct
  variation 1..14: note = Description of Sequence: ASO sequence
  misc_feature 1..14: note = Note: the sequence may be DNA or RNA
  source 1..14: mol_type = other RNA
ctccaccaggaggc

SEQ ID NO: 1566 - RNA, 14 nt, synthetic construct
  variation 1..14: note = Description of Sequence: ASO sequence
  misc_feature 1..14: note = Note: the sequence may be DNA or RNA
  source 1..14: mol_type = other RNA
gctccaccaggagg

SEQ ID NO: 1567 - RNA, 14 nt, synthetic construct
  variation 1..14: note = Description of Sequence: ASO sequence
  misc_feature 1..14: note = Note: the sequence may be DNA or RNA
  source 1..14: mol_type = other RNA
tgctccaccaggag

SEQ ID NO: 1568 - RNA, 14 nt, synthetic construct
  variation 1..14: note = Description of Sequence: ASO sequence
  misc_feature 1..14: note = Note: the sequence may be DNA or RNA
  source 1..14: mol_type = other RNA
ctgctccaccagga

SEQ ID NO: 1569 - RNA, 14 nt, synthetic construct
  variation 1..14: note = Description of Sequence: ASO sequence
  misc_feature 1..14: note = Note: the sequence may be DNA or RNA
  source 1..14: mol_type = other RNA
tctgctccaccagg

SEQ ID NO: 1570 - RNA, 14 nt, synthetic construct
  variation 1..14: note = Description of Sequence: ASO sequence
  misc_feature 1..14: note = Note: the sequence may be DNA or RNA
  source 1..14: mol_type = other RNA
ctctgctccaccag

SEQ ID NO: 1571 - RNA, 14 nt, synthetic construct
  variation 1..14: note = Description of Sequence: ASO sequence
  misc_feature 1..14: note = Note: the sequence may be DNA or RNA
  source 1..14: mol_type = other RNA
gctctgctccacca

SEQ ID NO: 1572 - RNA, 14 nt, synthetic construct
  variation 1..14: note = Description of Sequence: ASO sequence
  misc_feature 1..14: note = Note: the sequence may be DNA or RNA
  source 1..14: mol_type = other RNA
cgctctgctccacc

SEQ ID NO: 1573 - RNA, 14 nt, synthetic construct
  variation 1..14: note = Description of Sequence: ASO sequence
  misc_feature 1..14: note = Note: the sequence may be DNA or RNA
  source 1..14: mol_type = other RNA
ccgctctgctccac

SEQ ID NO: 1574 - RNA, 14 nt, synthetic construct
  variation 1..14: note = Description of Sequence: ASO sequence
  misc_feature 1..14: note = Note: the sequence may be DNA or RNA
  source 1..14: mol_type = other RNA
cccgctctgctcca

SEQ ID NO: 1575 - RNA, 14 nt, synthetic construct
  variation 1..14: note = Description of Sequence: ASO sequence
  misc_feature 1..14: note = Note: the sequence may be DNA or RNA
  source 1..14: mol_type = other RNA
ccccgctctgctcc

SEQ ID NO: 1576 - RNA, 14 nt, synthetic construct
  variation 1..14: note = Description of Sequence: ASO sequence
  misc_feature 1..14: note = Note: the sequence may be DNA or RNA
  source 1..14: mol_type = other RNA
tccccgctctgctc

SEQ ID NO: 1577 - RNA, 14 nt, synthetic construct
  variation 1..14: note = Description of Sequence: ASO sequence
  misc_feature 1..14: note = Note: the sequence may be DNA or RNA
  source 1..14: mol_type = other RNA
gtccccgctctgct

SEQ ID NO: 1578 - RNA, 14 nt, synthetic construct
  variation 1..14: note = Description of Sequence: ASO sequence
  misc_feature 1..14: note = Note: the sequence may be DNA or RNA
  source 1..14: mol_type = other RNA
agtccccgctctgc

SEQ ID NO: 1579 - RNA, 14 nt, synthetic construct
  variation 1..14: note = Description of Sequence: ASO sequence
  misc_feature 1..14: note = Note: the sequence may be DNA or RNA
  source 1..14: mol_type = other RNA
tagtccccgctctg

SEQ ID NO: 1580 - RNA, 14 nt, synthetic construct
  variation 1..14: note = Description of Sequence: ASO sequence
  misc_feature 1..14: note = Note: the sequence may be DNA or RNA
  source 1..14: mol_type = other RNA
gtagtccccgctct

SEQ ID NO: 1581 - RNA, 14 nt, synthetic construct
  variation 1..14: note = Description of Sequence: ASO sequence
  misc_feature 1..14: note = Note: the sequence may be DNA or RNA
  source 1..14: mol_type = other RNA
tgtagtccccgctc

SEQ ID NO: 1582 - RNA, 14 nt, synthetic construct
  variation 1..14: note = Description of Sequence: ASO sequence
  misc_feature 1..14: note = Note: the sequence may be DNA or RNA
  source 1..14: mol_type = other RNA
atgtagtccccgct

SEQ ID NO: 1583 - RNA, 14 nt, synthetic construct
  variation 1..14: note = Description of Sequence: ASO sequence
  misc_feature 1..14: note = Note: the sequence may be DNA or RNA
  source 1..14: mol_type = other RNA
gatgtagtccccgc

SEQ ID NO: 1584 - RNA, 14 nt, synthetic construct
  variation 1..14: note = Description of Sequence: ASO sequence
  misc_feature 1..14: note = Note: the sequence may be DNA or RNA
  source 1..14: mol_type = other RNA
tgatgtagtccccg

SEQ ID NO: 1585 - RNA, 14 nt, synthetic construct
  variation 1..14: note = Description of Sequence: ASO sequence
  misc_feature 1..14: note = Note: the sequence may be DNA or RNA
  source 1..14: mol_type = other RNA
ttgatgtagtcccc

SEQ ID NO: 1586 - RNA, 14 nt, synthetic construct
  variation 1..14: note = Description of Sequence: ASO sequence
  misc_feature 1..14: note = Note: the sequence may be DNA or RNA
  source 1..14: mol_type = other RNA
cttgatgtagtccc

SEQ ID NO: 1587 - RNA, 14 nt, synthetic construct
  variation 1..14: note = Description of Sequence: ASO sequence
  misc_feature 1..14: note = Note: the sequence may be DNA or RNA
  source 1..14: mol_type = other RNA
ccttgatgtagtcc

SEQ ID NO: 1588 - RNA, 14 nt, synthetic construct
  variation 1..14: note = Description of Sequence: ASO sequence
  misc_feature 1..14: note = Note: the sequence may be DNA or RNA
  source 1..14: mol_type = other RNA
accttgatgtagtc

SEQ ID NO: 1589 - RNA, 14 nt, synthetic construct
  variation 1..14: note = Description of Sequence: ASO sequence
  misc_feature 1..14: note = Note: the sequence may be DNA or RNA
  source 1..14: mol_type = other RNA
gaccttgatgtagt

SEQ ID NO: 1590 - RNA, 14 nt, synthetic construct
  variation 1..14: note = Description of Sequence: ASO sequence
  misc_feature 1..14: note = Note: the sequence may be DNA or RNA
  source 1..14: mol_type = other RNA
tgaccttgatgtag

SEQ ID NO: 1591 - RNA, 14 nt, synthetic construct
  variation 1..14: note = Description of Sequence: ASO sequence
  misc_feature 1..14: note = Note: the sequence may be DNA or RNA
  source 1..14: mol_type = other RNA
ctgaccttgatgta

SEQ ID NO: 1592 - RNA, 14 nt, synthetic construct
  variation 1..14: note = Description of Sequence: ASO sequence
  misc_feature 1..14: note = Note: the sequence may be DNA or RNA
  source 1..14: mol_type = other RNA
gctgaccttgatgt

SEQ ID NO: 1593 - RNA, 14 nt, synthetic construct
  variation 1..14: note = Description of Sequence: ASO sequence
  misc_feature 1..14: note = Note: the sequence may be DNA or RNA
  source 1..14: mol_type = other RNA
tgctgaccttgatg

SEQ ID NO: 1594 - RNA, 14 nt, synthetic construct
  variation 1..14: note = Description of Sequence: ASO sequence
  misc_feature 1..14: note = Note: the sequence may be DNA or RNA
  source 1..14: mol_type = other RNA
atgctgaccttgat

SEQ ID NO: 1595 - RNA, 14 nt, synthetic construct
  variation 1..14: note = Description of Sequence: ASO sequence
  misc_feature 1..14: note = Note: the sequence may be DNA or RNA
  source 1..14: mol_type = other RNA
gatgctgaccttga

SEQ ID NO: 1596 - RNA, 14 nt, synthetic construct
  variation 1..14: note = Description of Sequence: ASO sequence
  misc_feature 1..14: note = Note: the sequence may be DNA or RNA
  source 1..14: mol_type = other RNA
ggatgctgaccttg

SEQ ID NO: 1597 - RNA, 14 nt, synthetic construct
  variation 1..14: note = Description of Sequence: ASO sequence
  misc_feature 1..14: note = Note: the sequence may be DNA or RNA
  source 1..14: mol_type = other RNA
cggatgctgacctt

SEQ ID NO: 1598 - RNA, 14 nt, synthetic construct
  variation 1..14: note = Description of Sequence: ASO sequence
  misc_feature 1..14: note = Note: the sequence may be DNA or RNA
  source 1..14: mol_type = other RNA
ccggatgctgacct

SEQ ID NO: 1599 - RNA, 14 nt, synthetic construct
  variation 1..14: note = Description of Sequence: ASO sequence
  misc_feature 1..14: note = Note: the sequence may be DNA or RNA
  source 1..14: mol_type = other RNA
gccggatgctgacc

SEQ ID NO: 1600 - RNA, 14 nt, synthetic construct
  variation 1..14: note = Description of Sequence: ASO sequence
  misc_feature 1..14: note = Note: the sequence may be DNA or RNA
  source 1..14: mol_type = other RNA
agccggatgctgac

SEQ ID NO: 1601 - RNA, 14 nt, synthetic construct
  variation 1..14: note = Description of Sequence: ASO sequence
  misc_feature 1..14: note = Note: the sequence may be DNA or RNA
  source 1..14: mol_type = other RNA
cagccggatgctga

SEQ ID NO: 1602 - RNA, 14 nt, synthetic construct
  variation 1..14: note = Description of Sequence: ASO sequence
  misc_feature 1..14: note = Note: the sequence may be DNA or RNA
  source 1..14: mol_type = other RNA
ccagccggatgctg

SEQ ID NO: 1603 - RNA, 14 nt, synthetic construct
  variation 1..14: note = Description of Sequence: ASO sequence
  misc_feature 1..14: note = Note: the sequence may be DNA or RNA
  source 1..14: mol_type = other RNA
accagccggatgct

SEQ ID NO: 1604 - RNA, 14 nt, synthetic construct
  variation 1..14: note = Description of Sequence: ASO sequence
  misc_feature 1..14: note = Note: the sequence may be DNA or RNA
  source 1..14: mol_type = other RNA
caccagccggatgc

SEQ ID NO: 1605 - RNA, 14 nt, synthetic construct
  variation 1..14: note = Description of Sequence: ASO sequence
  misc_feature 1..14: note = Note: the sequence may be DNA or RNA
  source 1..14: mol_type = other RNA
gcaccagccggatg

SEQ ID NO: 1606 - RNA, 14 nt, synthetic construct
  variation 1..14: note = Description of Sequence: ASO sequence
  misc_feature 1..14: note = Note: the sequence may be DNA or RNA
  source 1..14: mol_type = other RNA
agcaccagccggat

SEQ ID NO: 1607 - RNA, 14 nt, synthetic construct
  variation 1..14: note = Description of Sequence: ASO sequence
  misc_feature 1..14: note = Note: the sequence may be DNA or RNA
  source 1..14: mol_type = other RNA
cagcaccagccgga

SEQ ID NO: 1608 - RNA, 14 nt, synthetic construct
  variation 1..14: note = Description of Sequence: ASO sequence
  misc_feature 1..14: note = Note: the sequence may be DNA or RNA
  source 1..14: mol_type = other RNA
tcagcaccagccgg

SEQ ID NO: 1609 - RNA, 14 nt, synthetic construct
  variation 1..14: note = Description of Sequence: ASO sequence
  misc_feature 1..14: note = Note: the sequence may be DNA or RNA
  source 1..14: mol_type = other RNA
gtcagcaccagccg

SEQ ID NO: 1610 - RNA, 14 nt, synthetic construct
  variation 1..14: note = Description of Sequence: ASO sequence
  misc_feature 1..14: note = Note: the sequence may be DNA or RNA
  source 1..14: mol_type = other RNA
tgtcagcaccagcc

SEQ ID NO: 1611 - RNA, 14 nt, synthetic construct
  variation 1..14: note = Description of Sequence: ASO sequence
  misc_feature 1..14: note = Note: the sequence may be DNA or RNA
  source 1..14: mol_type = other RNA
atgtcagcaccagc

SEQ ID NO: 1612 - RNA, 14 nt, synthetic construct
  variation 1..14: note = Description of Sequence: ASO sequence
  misc_feature 1..14: note = Note: the sequence may be DNA or RNA
  source 1..14: mol_type = other RNA
aatgtcagcaccag

SEQ ID NO: 1613 - RNA, 14 nt, synthetic construct
  variation 1..14: note = Description of Sequence: ASO sequence
  misc_feature 1..14: note = Note: the sequence may be DNA or RNA
  source 1..14: mol_type = other RNA
gaatgtcagcacca

SEQ ID NO: 1614 - RNA, 14 nt, synthetic construct
  variation 1..14: note = Description of Sequence: ASO sequence
  misc_feature 1..14: note = Note: the sequence may be DNA or RNA
  source 1..14: mol_type = other RNA
ggaatgtcagcacc

SEQ ID NO: 1615 - RNA, 14 nt, synthetic construct
  variation 1..14: note = Description of Sequence: ASO sequence
  misc_feature 1..14: note = Note: the sequence may be DNA or RNA
  source 1..14: mol_type = other RNA
aggaatgtcagcac

SEQ ID NO: 1616 - RNA, 14 nt, synthetic construct
  variation 1..14: note = Description of Sequence: ASO sequence
  misc_feature 1..14: note = Note: the sequence may be DNA or RNA
  source 1..14: mol_type = other RNA
caggaatgtcagca

SEQ ID NO: 1617 - RNA, 14 nt, synthetic construct
  variation 1..14: note = Description of Sequence: ASO sequence
  misc_feature 1..14: note = Note: the sequence may be DNA or RNA
  source 1..14: mol_type = other RNA
acaggaatgtcagc

SEQ ID NO: 1618 - RNA, 14 nt, synthetic construct
  variation 1..14: note = Description of Sequence: ASO sequence
  misc_feature 1..14: note = Note: the sequence may be DNA or RNA
  source 1..14: mol_type = other RNA
cacaggaatgtcag

SEQ ID NO: 1619 - RNA, 14 nt, synthetic construct
  variation 1..14: note = Description of Sequence: ASO sequence
  misc_feature 1..14: note = Note: the sequence may be DNA or RNA
  source 1..14: mol_type = other RNA
ccacaggaatgtca

SEQ ID NO: 1620 - RNA, 14 nt, synthetic construct
  variation 1..14: note = Description of Sequence: ASO sequence
  misc_feature 1..14: note = Note: the sequence may be DNA or RNA
  source 1..14: mol_type = other RNA
tccacaggaatgtc

SEQ ID NO: 1621 - RNA, 14 nt, synthetic construct
  variation 1..14: note = Description of Sequence: ASO sequence
  misc_feature 1..14: note = Note: the sequence may be DNA or RNA
  source 1..14: mol_type = other RNA
ttccacaggaatgt

SEQ ID NO: 1622 - RNA, 14 nt, synthetic construct
  variation 1..14: note = Description of Sequence: ASO sequence
  misc_feature 1..14: note = Note: the sequence may be DNA or RNA
  source 1..14: mol_type = other RNA
gttccacaggaatg

SEQ ID NO: 1623 - RNA, 14 nt, synthetic construct
  variation 1..14: note = Description of Sequence: ASO sequence
  misc_feature 1..14: note = Note: the sequence may be DNA or RNA
  source 1..14: mol_type = other RNA
cgttccacaggaat

SEQ ID NO: 1624 - RNA, 14 nt, synthetic construct
  variation 1..14: note = Description of Sequence: ASO sequence
  misc_feature 1..14: note = Note: the sequence may be DNA or RNA
  source 1..14: mol_type = other RNA
ccgttccacaggaa

SEQ ID NO: 1625 - RNA, 14 nt, synthetic construct
  variation 1..14: note = Description of Sequence: ASO sequence
  misc_feature 1..14: note = Note: the sequence may be DNA or RNA
  source 1..14: mol_type = other RNA
tccgttccacagga

SEQ ID NO: 1626 - RNA, 14 nt, synthetic construct
  variation 1..14: note = Description of Sequence: ASO sequence
  misc_feature 1..14: note = Note: the sequence may be DNA or RNA
  source 1..14: mol_type = other RNA
ctccgttccacagg

SEQ ID NO: 1627 - RNA, 14 nt, synthetic construct
  variation 1..14: note = Description of Sequence: ASO sequence
  misc_feature 1..14: note = Note: the sequence may be DNA or RNA
  source 1..14: mol_type = other RNA
tctccgttccacag

SEQ ID NO: 1628 - RNA, 14 nt, synthetic construct
  variation 1..14: note = Description of Sequence: ASO sequence
  misc_feature 1..14: note = Note: the sequence may be DNA or RNA
  source 1..14: mol_type = other RNA
ctctccgttccaca

SEQ ID NO: 1629 - RNA, 14 nt, synthetic construct
  variation 1..14: note = Description of Sequence: ASO sequence
  misc_feature 1..14: note = Note: the sequence may be DNA or RNA
  source 1..14: mol_type = other RNA
cctctccgttccac

SEQ ID NO: 1630 - RNA, 14 nt, synthetic construct
  variation 1..14: note = Description of Sequence: ASO sequence
  misc_feature 1..14: note = Note: the sequence may be DNA or RNA
  source 1..14: mol_type = other RNA
tcctctccgttcca

SEQ ID NO: 1631 - RNA, 14 nt, synthetic construct
  variation 1..14: note = Description of Sequence: ASO sequence
  misc_feature 1..14: note = Note: the sequence may be DNA or RNA
  source 1..14: mol_type = other RNA
gtcctctccgttcc

SEQ ID NO: 1632 - RNA, 14 nt, synthetic construct
  variation 1..14: note = Description of Sequence: ASO sequence
  misc_feature 1..14: note = Note: the sequence may be DNA or RNA
  source 1..14: mol_type = other RNA
tgtcctctccgttc

SEQ ID NO: 1633 - RNA, 14 nt, synthetic construct
  variation 1..14: note = Description of Sequence: ASO sequence
  misc_feature 1..14: note = Note: the sequence may be DNA or RNA
  source 1..14: mol_type = other RNA
ctgtcctctccgtt

SEQ ID NO: 1634 - RNA, 14 nt, synthetic construct
  variation 1..14: note = Description of Sequence: ASO sequence
  misc_feature 1..14: note = Note: the sequence may be DNA or RNA
  source 1..14: mol_type = other RNA
actgtcctctccgt

SEQ ID NO: 1635 - RNA, 14 nt, synthetic construct
  variation 1..14: note = Description of Sequence: ASO sequence
  misc_feature 1..14: note = Note: the sequence may be DNA or RNA
  source 1..14: mol_type = other RNA
cactgtcctctccg

SEQ ID NO: 1636 - RNA, 14 nt, synthetic construct
  variation 1..14: note = Description of Sequence: ASO sequence
  misc_feature 1..14: note = Note: the sequence may be DNA or RNA
  source 1..14: mol_type = other RNA
gcactgtcctctcc

SEQ ID NO: 1637 - RNA, 14 nt, synthetic construct
  variation 1..14: note = Description of Sequence: ASO sequence
  misc_feature 1..14: note = Note: the sequence may be DNA or RNA
  source 1..14: mol_type = other RNA
ggcactgtcctctc

SEQ ID NO: 1638 - RNA, 14 nt, synthetic construct
  variation 1..14: note = Description of Sequence: ASO sequence
  misc_feature 1..14: note = Note: the sequence may be DNA or RNA
  source 1..14: mol_type = other RNA
gggcactgtcctct

SEQ ID NO: 1639 - RNA, 14 nt, synthetic construct
  variation 1..14: note = Description of Sequence: ASO sequence
  misc_feature 1..14: note = Note: the sequence may be DNA or RNA
  source 1..14: mol_type = other RNA
agggcactgtcctc

SEQ ID NO: 1640 - RNA, 14 nt, synthetic construct
  variation 1..14: note = Description of Sequence: ASO sequence
  misc_feature 1..14: note = Note: the sequence may be DNA or RNA
  source 1..14: mol_type = other RNA
cagggcactgtcct

SEQ ID NO: 1641 - RNA, 14 nt, synthetic construct
  variation 1..14: note = Description of Sequence: ASO sequence
  misc_feature 1..14: note = Note: the sequence may be DNA or RNA
  source 1..14: mol_type = other RNA
ggatccagctccag

SEQ ID NO: 1642 - RNA, 14 nt, synthetic construct
  variation 1..14: note = Description of Sequence: ASO sequence
  misc_feature 1..14: note = Note: the sequence may be DNA or RNA
  source 1..14: mol_type = other RNA
gggatccagctcca

SEQ ID NO: 1643 - RNA, 14 nt, synthetic construct
  variation 1..14: note = Description of Sequence: ASO sequence
  misc_feature 1..14: note = Note: the sequence may be DNA or RNA
  source 1..14: mol_type = other RNA
tgggatccagctcc

SEQ ID NO: 1644 - RNA, 14 nt, synthetic construct
  variation 1..14: note = Description of Sequence: ASO sequence
  misc_feature 1..14: note = Note: the sequence may be DNA or RNA
  source 1..14: mol_type = other RNA
ttgggatccagctc

SEQ ID NO: 1645 - RNA, 14 nt, synthetic construct
  variation 1..14: note = Description of Sequence: ASO sequence
  misc_feature 1..14: note = Note: the sequence may be DNA or RNA
  source 1..14: mol_type = other RNA
tttgggatccagct

SEQ ID NO: 1646 - RNA, 14 nt, synthetic construct
  variation 1..14: note = Description of Sequence: ASO sequence
  misc_feature 1..14: note = Note: the sequence may be DNA or RNA
  source 1..14: mol_type = other RNA
atttgggatccagc

SEQ ID NO: 1647 - RNA, 14 nt, synthetic construct
  variation 1..14: note = Description of Sequence: ASO sequence
  misc_feature 1..14: note = Note: the sequence may be DNA or RNA
  source 1..14: mol_type = other RNA
tatttgggatccag

SEQ ID NO: 1648 - RNA, 14 nt, synthetic construct
  variation 1..14: note = Description of Sequence: ASO sequence
  misc_feature 1..14: note = Note: the sequence may be DNA or RNA
  source 1..14: mol_type = other RNA
gtatttgggatcca

SEQ ID NO: 1649 - RNA, 14 nt, synthetic construct
  variation 1..14: note = Description of Sequence: ASO sequence
  misc_feature 1..14: note = Note: the sequence may be DNA or RNA
  source 1..14: mol_type = other RNA
cgtatttgggatcc

SEQ ID NO: 1650 - RNA, 14 nt, synthetic construct
  variation 1..14: note = Description of Sequence: ASO sequence
  misc_feature 1..14: note = Note: the sequence may be DNA or RNA
  source 1..14: mol_type = other RNA
gcgtatttgggatc

SEQ ID NO: 1651 - RNA, 14 nt, synthetic construct
  variation 1..14: note = Description of Sequence: ASO sequence
  misc_feature 1..14: note = Note: the sequence may be DNA or RNA
  source 1..14: mol_type = other RNA
ggcgtatttgggat

SEQ ID NO: 1652 - RNA, 14 nt, synthetic construct
  variation 1..14: note = Description of Sequence: ASO sequence
  misc_feature 1..14: note = Note: the sequence may be DNA or RNA
  source 1..14: mol_type = other RNA
tggcgtatttggga

SEQ ID NO: 1653 - RNA, 14 nt, synthetic construct
  variation 1..14: note = Description of Sequence: ASO sequence
  misc_feature 1..14: note = Note: the sequence may be DNA or RNA
  source 1..14: mol_type = other RNA
ttggcgtatttggg

SEQ ID NO: 1654 - RNA, 14 nt, synthetic construct
  variation 1..14: note = Description of Sequence: ASO sequence
  misc_feature 1..14: note = Note: the sequence may be DNA or RNA
  source 1..14: mol_type = other RNA
gttggcgtatttgg

SEQ ID NO: 1655 - RNA, 14 nt, synthetic construct
  variation 1..14: note = Description of Sequence: ASO sequence
  misc_feature 1..14: note = Note: the sequence may be DNA or RNA
  source 1..14: mol_type = other RNA
ggttggcgtatttg

SEQ ID NO: 1656 - RNA, 14 nt, synthetic construct
  variation 1..14: note = Description of Sequence: ASO sequence
  misc_feature 1..14: note = Note: the sequence may be DNA or RNA
  source 1..14: mol_type = other RNA
tggttggcgtattt

SEQ ID NO: 1657 - RNA, 14 nt, synthetic construct
  variation 1..14: note = Description of Sequence: ASO sequence
  misc_feature 1..14: note = Note: the sequence may be DNA or RNA
  source 1..14: mol_type = other RNA
ctggttggcgtatt

SEQ ID NO: 1658 - RNA, 14 nt, synthetic construct
  variation 1..14: note = Description of Sequence: ASO sequence
  misc_feature 1..14: note = Note: the sequence may be DNA or RNA
  source 1..14: mol_type = other RNA
tctggttggcgtat

SEQ ID NO: 1659 - RNA, 14 nt, synthetic construct
  variation 1..14: note = Description of Sequence: ASO sequence
  misc_feature 1..14: note = Note: the sequence may be DNA or RNA
  source 1..14: mol_type = other RNA
gtctggttggcgta

SEQ ID NO: 1660 - RNA, 14 nt, synthetic construct
  variation 1..14: note = Description of Sequence: ASO sequence
  misc_feature 1..14: note = Note: the sequence may be DNA or RNA
  source 1..14: mol_type = other RNA
ggtctggttggcgt

SEQ ID NO: 1661 - RNA, 14 nt, synthetic construct
  variation 1..14: note = Description of Sequence: ASO sequence
  misc_feature 1..14: note = Note: the sequence may be DNA or RNA
  source 1..14: mol_type = other RNA
aggtctggttggcg

SEQ ID NO: 1662 - RNA, 14 nt, synthetic construct
  variation 1..14: note = Description of Sequence: ASO sequence
  misc_feature 1..14: note = Note: the sequence may be DNA or RNA
  source 1..14: mol_type = other RNA
caggtctggttggc

SEQ ID NO: 1663 - RNA, 14 nt, synthetic construct
  variation 1..14: note = Description of Sequence: ASO sequence
  misc_feature 1..14: note = Note: the sequence may be DNA or RNA
  source 1..14: mol_type = other RNA
acaggtctggttgg

SEQ ID NO: 1664 - RNA, 14 nt, synthetic construct
  variation 1..14: note = Description of Sequence: ASO sequence
  misc_feature 1..14: note = Note: the sequence may be DNA or RNA
  source 1..14: mol_type = other RNA
cacaggtctggttg

SEQ ID NO: 1665 - RNA, 14 nt, synthetic construct
  variation 1..14: note = Description of Sequence: ASO sequence
  misc_feature 1..14: note = Note: the sequence may be DNA or RNA
  source 1..14: mol_type = other RNA
ccacaggtctggtt

SEQ ID NO: 1666 - RNA, 14 nt, synthetic construct
  variation 1..14: note = Description of Sequence: ASO sequence
  misc_feature 1..14: note = Note: the sequence may be DNA or RNA
  source 1..14: mol_type = other RNA
gccacaggtctggt

SEQ ID NO: 1667 - RNA, 14 nt, synthetic construct
  variation 1..14: note = Description of Sequence: ASO sequence
  misc_feature 1..14: note = Note: the sequence may be DNA or RNA
  source 1..14: mol_type = other RNA
ggccacaggtctgg

SEQ ID NO: 1668 - RNA, 14 nt, synthetic construct
  variation 1..14: note = Description of Sequence: ASO sequence
  misc_feature 1..14: note = Note: the sequence may be DNA or RNA
  source 1..14: mol_type = other RNA
aggccacaggtctg

SEQ ID NO: 1669 - RNA, 14 nt, synthetic construct
  variation 1..14: note = Description of Sequence: ASO sequence
  misc_feature 1..14: note = Note: the sequence may be DNA or RNA
  source 1..14: mol_type = other RNA
caggccacaggtct

SEQ ID NO: 1670 - RNA, 14 nt, synthetic construct
  variation 1..14: note = Description of Sequence: ASO sequence
  misc_feature 1..14: note = Note: the sequence may be DNA or RNA
  source 1..14: mol_type = other RNA
acaggccacaggtc

SEQ ID NO: 1671 - RNA, 14 nt, synthetic construct
  variation 1..14: note = Description of Sequence: ASO sequence
  misc_feature 1..14: note = Note: the sequence may be DNA or RNA
  source 1..14: mol_type = other RNA
cacaggccacaggt

SEQ ID NO: 1672 - RNA, 14 nt, synthetic construct
  variation 1..14: note = Description of Sequence: ASO sequence
  misc_feature 1..14: note = Note: the sequence may be DNA or RNA
  source 1..14: mol_type = other RNA
acacaggccacagg

SEQ ID NO: 1673 - RNA, 14 nt, synthetic construct
  variation 1..14: note = Description of Sequence: ASO sequence
  misc_feature 1..14: note = Note: the sequence may be DNA or RNA
  source 1..14: mol_type = other RNA
cacacaggccacag

SEQ ID NO: 1674 - RNA, 14 nt, synthetic construct
  variation 1..14: note = Description of Sequence: ASO sequence
  misc_feature 1..14: note = Note: the sequence may be DNA or RNA
  source 1..14: mol_type = other RNA
ccacacaggccaca

SEQ ID NO: 1675 - RNA, 14 nt, synthetic construct
  variation 1..14: note = Description of Sequence: ASO sequence
  misc_feature 1..14: note = Note: the sequence may be DNA or RNA
  source 1..14: mol_type = other RNA
cccacacaggccac

SEQ ID NO: 1676 - RNA, 14 nt, synthetic construct
  variation 1..14: note = Description of Sequence: ASO sequence
  misc_feature 1..14: note = Note: the sequence may be DNA or RNA
  source 1..14: mol_type = other RNA
ccccacacaggcca

SEQ ID NO: 1677 - RNA, 14 nt, synthetic construct
  variation 1..14: note = Description of Sequence: ASO sequence
  misc_feature 1..14: note = Note: the sequence may be DNA or RNA
  source 1..14: mol_type = other RNA
tccccacacaggcc

SEQ ID NO: 1678 - RNA, 14 nt, synthetic construct
  variation 1..14: note = Description of Sequence: ASO sequence
  misc_feature 1..14: note = Note: the sequence may be DNA or RNA
  source 1..14: mol_type = other RNA
gtccccacacaggc

SEQ ID NO: 1679 - RNA, 14 nt, synthetic construct
  variation 1..14: note = Description of Sequence: ASO sequence
  misc_feature 1..14: note = Note: the sequence may be DNA or RNA
  source 1..14: mol_type = other RNA
agtccccacacagg

SEQ ID NO: 1680 - RNA, 14 nt, synthetic construct
  variation 1..14: note = Description of Sequence: ASO sequence
  misc_feature 1..14: note = Note: the sequence may be DNA or RNA
  source 1..14: mol_type = other RNA
aagtccccacacag

SEQ ID NO: 1681 - RNA, 14 nt, synthetic construct
  variation 1..14: note = Description of Sequence: ASO sequence
  misc_feature 1..14: note = Note: the sequence may be DNA or RNA
  source 1..14: mol_type = other RNA
gaagtccccacaca

SEQ ID NO: 1682 - RNA, 14 nt, synthetic construct
  variation 1..14: note = Description of Sequence: ASO sequence
  misc_feature 1..14: note = Note: the sequence may be DNA or RNA
  source 1..14: mol_type = other RNA
tgaagtccccacac

SEQ ID NO: 1683 - RNA, 14 nt, synthetic construct
  variation 1..14: note = Description of Sequence: ASO sequence
  misc_feature 1..14: note = Note: the sequence may be DNA or RNA
  source 1..14: mol_type = other RNA
ttgaagtccccaca

SEQ ID NO: 1684 - RNA, 14 nt, synthetic construct
  variation 1..14: note = Description of Sequence: ASO sequence
  misc_feature 1..14: note = Note: the sequence may be DNA or RNA
  source 1..14: mol_type = other RNA
gttgaagtccccac

SEQ ID NO: 1685 - RNA, 14 nt, synthetic construct
  variation 1..14: note = Description of Sequence: ASO sequence
  misc_feature 1..14: note = Note: the sequence may be DNA or RNA
  source 1..14: mol_type = other RNA
cgttgaagtcccca

SEQ ID NO: 1686 - RNA, 14 nt, synthetic construct
  variation 1..14: note = Description of Sequence: ASO sequence
  misc_feature 1..14: note = Note: the sequence may be DNA or RNA
  source 1..14: mol_type = other RNA
ccgttgaagtcccc

SEQ ID NO: 1687 - RNA, 14 nt, synthetic construct
  variation 1..14: note = Description of Sequence: ASO sequence
  misc_feature 1..14: note = Note: the sequence may be DNA or RNA
  source 1..14: mol_type = other RNA
gccgttgaagtccc

SEQ ID NO: 1688 - RNA, 14 nt, synthetic construct
  variation 1..14: note = Description of Sequence: ASO sequence
  misc_feature 1..14: note = Note: the sequence may be DNA or RNA
  source 1..14: mol_type = other RNA
ggccgttgaagtcc

SEQ ID NO: 1689 - RNA, 14 nt, synthetic construct
  variation 1..14: note = Description of Sequence: ASO sequence
  misc_feature 1..14: note = Note: the sequence may be DNA or RNA
  source 1..14: mol_type = other RNA
aggccgttgaagtc

SEQ ID NO: 1690 - RNA, 14 nt, synthetic construct
  variation 1..14: note = Description of Sequence: ASO sequence
  misc_feature 1..14: note = Note: the sequence may be DNA or RNA
  source 1..14: mol_type = other RNA
gaggccgttgaagt

SEQ ID NO: 1691 - RNA, 14 nt, synthetic construct
  variation 1..14: note = Description of Sequence: ASO sequence
  misc_feature 1..14: note = Note: the sequence may be DNA or RNA
  source 1..14: mol_type = other RNA
ggaggccgttgaag

SEQ ID NO: 1692 - RNA, 14 nt, synthetic construct
  variation 1..14: note = Description of Sequence: ASO sequence
  misc_feature 1..14: note = Note: the sequence may be DNA or RNA
  source 1..14: mol_type = other RNA
gggaggccgttgaa

SEQ ID NO: 1693 - RNA, 14 nt, synthetic construct
  variation 1..14: note = Description of Sequence: ASO sequence
  misc_feature 1..14: note = Note: the sequence may be DNA or RNA
  source 1..14: mol_type = other RNA
cgggaggccgttga

SEQ ID NO: 1694 - RNA, 14 nt, synthetic construct
  variation 1..14: note = Description of Sequence: ASO sequence
  misc_feature 1..14: note = Note: the sequence may be DNA or RNA
  source 1..14: mol_type = other RNA
ccgggaggccgttg

SEQ ID NO: 1695 - RNA, 14 nt, synthetic construct
  variation 1..14: note = Description of Sequence: ASO sequence
  misc_feature 1..14: note = Note: the sequence may be DNA or RNA
  source 1..14: mol_type = other RNA
gccgggaggccgtt

SEQ ID NO: 1696 - RNA, 14 nt, synthetic construct
  variation 1..14: note = Description of Sequence: ASO sequence
  misc_feature 1..14: note = Note: the sequence may be DNA or RNA
  source 1..14: mol_type = other RNA
ggccgggaggccgt

SEQ ID NO: 1697 - RNA, 14 nt, synthetic construct
  variation 1..14: note = Description of Sequence: ASO sequence
  misc_feature 1..14: note = Note: the sequence may be DNA or RNA
  source 1..14: mol_type = other RNA
aggccgggaggccg

SEQ ID NO: 1698 - RNA, 14 nt, synthetic construct
  variation 1..14: note = Description of Sequence: ASO sequence
  misc_feature 1..14: note = Note: the sequence may be DNA or RNA
  source 1..14: mol_type = other RNA
aaggccgggaggcc

SEQ ID NO: 1699 - RNA, 14 nt, synthetic construct
  variation 1..14: note = Description of Sequence: ASO sequence
  misc_feature 1..14: note = Note: the sequence may be DNA or RNA
  source 1..14: mol_type = other RNA
gaaggccgggaggc

SEQ ID NO: 1700 - RNA, 14 nt, synthetic construct
  variation 1..14: note = Description of Sequence: ASO sequence
  misc_feature 1..14: note = Note: the sequence may be DNA or RNA
  source 1..14: mol_type = other RNA
tgaaggccgggagg

SEQ ID NO: 1701 - RNA, 14 nt, synthetic construct
  variation 1..14: note = Description of Sequence: ASO sequence
  misc_feature 1..14: note = Note: the sequence may be DNA or RNA
  source 1..14: mol_type = other RNA
ttgaaggccgggag

SEQ ID NO: 1702 - RNA, 14 nt, synthetic construct
  variation 1..14: note = Description of Sequence: ASO sequence
  misc_feature 1..14: note = Note: the sequence may be DNA or RNA
  source 1..14: mol_type = other RNA
gttgaaggccggga

SEQ ID NO: 1703 - RNA, 14 nt, synthetic construct
  variation 1..14: note = Description of Sequence: ASO sequence
  misc_feature 1..14: note = Note: the sequence may be DNA or RNA
  source 1..14: mol_type = other RNA
cgttgaaggccggg

SEQ ID NO: 1704 - RNA, 14 nt, synthetic construct
  variation 1..14: note = Description of Sequence: ASO sequence
  misc_feature 1..14: note = Note: the sequence may be DNA or RNA
  source 1..14: mol_type = other RNA
tcgttgaaggccgg

SEQ ID NO: 1705 - RNA, 14 nt, synthetic construct
  variation 1..14: note = Description of Sequence: ASO sequence
  misc_feature 1..14: note = Note: the sequence may be DNA or RNA
  source 1..14: mol_type = other RNA
ctcgttgaaggccg

SEQ ID NO: 1706 - RNA, 14 nt, synthetic construct
  variation 1..14: note = Description of Sequence: ASO sequence
  misc_feature 1..14: note = Note: the sequence may be DNA or RNA
  source 1..14: mol_type = other RNA
actcgttgaaggcc

SEQ ID NO: 1707 - RNA, 14 nt, synthetic construct
  variation 1..14: note = Description of Sequence: ASO sequence
  misc_feature 1..14: note = Note: the sequence may be DNA or RNA
  source 1..14: mol_type = other RNA
aactcgttgaaggc

SEQ ID NO: 1708 - RNA, 14 nt, synthetic construct
  variation 1..14: note = Description of Sequence: ASO sequence
  misc_feature 1..14: note = Note: the sequence may be DNA or RNA
  source 1..14: mol_type = other RNA
gaactcgttgaagg

SEQ ID NO: 1709 - RNA, 14 nt, synthetic construct
  variation 1..14: note = Description of Sequence: ASO sequence
  misc_feature 1..14: note = Note: the sequence may be DNA or RNA
  source 1..14: mol_type = other RNA
agaactcgttgaag

SEQ ID NO: 1710 - RNA, 14 nt, synthetic construct
  variation 1..14: note = Description of Sequence: ASO sequence
  misc_feature 1..14: note = Note: the sequence may be DNA or RNA
  source 1..14: mol_type = other RNA
tagaactcgttgaa

SEQ ID NO: 1711 - RNA, 14 nt, synthetic construct
  variation 1..14: note = Description of Sequence: ASO sequence
  misc_feature 1..14: note = Note: the sequence may be DNA or RNA
  source 1..14: mol_type = other RNA
atagaactcgttga

SEQ ID NO: 1712 - RNA, 14 nt, synthetic construct
  variation 1..14: note = Description of Sequence: ASO sequence
  misc_feature 1..14: note = Note: the sequence may be DNA or RNA
  source 1..14: mol_type = other RNA
catagaactcgttg

SEQ ID NO: 1713 - RNA, 14 nt, synthetic construct
  variation 1..14: note = Description of Sequence: ASO sequence
  misc_feature 1..14: note = Note: the sequence may be DNA or RNA
  source 1..14: mol_type = other RNA
gcatagaactcgtt

SEQ ID NO: 1714 - RNA, 14 nt, synthetic construct
  variation 1..14: note = Description of Sequence: ASO sequence
  misc_feature 1..14: note = Note: the sequence may be DNA or RNA
  source 1..14: mol_type = other RNA
ggcatagaactcgt

SEQ ID NO: 1715 - RNA, 14 nt, synthetic construct
  variation 1..14: note = Description of Sequence: ASO sequence
  misc_feature 1..14: note = Note: the sequence may be DNA or RNA
  source 1..14: mol_type = other RNA
gggcatagaactcg

SEQ ID NO: 1716 - RNA, 14 nt, synthetic construct
  variation 1..14: note = Description of Sequence: ASO sequence
  misc_feature 1..14: note = Note: the sequence may be DNA or RNA
  source 1..14: mol_type = other RNA
tgggcatagaactc

SEQ ID NO: 1717 - RNA, 14 nt, synthetic construct
  variation 1..14: note = Description of Sequence: ASO sequence
  misc_feature 1..14: note = Note: the sequence may be DNA or RNA
  source 1..14: mol_type = other RNA
gtgggcatagaact

SEQ ID NO: 1718 - RNA, 14 nt, synthetic construct
  variation 1..14: note = Description of Sequence: ASO sequence
  misc_feature 1..14: note = Note: the sequence may be DNA or RNA
  source 1..14: mol_type = other RNA
tgtgggcatagaac

SEQ ID NO: 1719 - RNA, 14 nt, synthetic construct
  variation 1..14: note = Description of Sequence: ASO sequence
  misc_feature 1..14: note = Note: the sequence may be DNA or RNA
  source 1..14: mol_type = other RNA
ggtcagcctggcgt

SEQ ID NO: 1720 - RNA, 14 nt, synthetic construct
  variation 1..14: note = Description of Sequence: ASO sequence
  misc_feature 1..14: note = Note: the sequence may be DNA or RNA
  source 1..14: mol_type = other RNA
gggtcagcctggcg

SEQ ID NO: 1721 - RNA, 14 nt, synthetic construct
  variation 1..14: note = Description of Sequence: ASO sequence
  misc_feature 1..14: note = Note: the sequence may be DNA or RNA
  source 1..14: mol_type = other RNA
ggggtcagcctggc

SEQ ID NO: 1722 - RNA, 14 nt, synthetic construct
  variation 1..14: note = Description of Sequence: ASO sequence
  misc_feature 1..14: note = Note: the sequence may be DNA or RNA
  source 1..14: mol_type = other RNA
cggggtcagcctgg

SEQ ID NO: 1723 - RNA, 14 nt, synthetic construct
  variation 1..14: note = Description of Sequence: ASO sequence
  misc_feature 1..14: note = Note: the sequence may be DNA or RNA
  source 1..14: mol_type = other RNA
gcggggtcagcctg

SEQ ID NO: 1724 - RNA, 14 nt, synthetic construct
  variation 1..14: note = Description of Sequence: ASO sequence
  misc_feature 1..14: note = Note: the sequence may be DNA or RNA
  source 1..14: mol_type = other RNA
agcggggtcagcct

SEQ ID NO: 1725 - RNA, 14 nt, synthetic construct
  variation 1..14: note = Description of Sequence: ASO sequence
  misc_feature 1..14: note = Note: the sequence may be DNA or RNA
  source 1..14: mol_type = other RNA
gagcggggtcagcc

SEQ ID NO: 1726 - RNA, 14 nt, synthetic construct
  variation 1..14: note = Description of Sequence: ASO sequence
  misc_feature 1..14: note = Note: the sequence may be DNA or RNA
  source 1..14: mol_type = other RNA
ggagcggggtcagc

SEQ ID NO: 1727 - RNA, 14 nt, synthetic construct
  variation 1..14: note = Description of Sequence: ASO sequence
  misc_feature 1..14: note = Note: the sequence may be DNA or RNA
  source 1..14: mol_type = other RNA
tggagcggggtcag

SEQ ID NO: 1728 - RNA, 14 nt, synthetic construct
  variation 1..14: note = Description of Sequence: ASO sequence
  misc_feature 1..14: note = Note: the sequence may be DNA or RNA
  source 1..14: mol_type = other RNA
ctggagcggggtca

SEQ ID NO: 1729 - RNA, 14 nt, synthetic construct
  variation 1..14: note = Description of Sequence: ASO sequence
  misc_feature 1..14: note = Note: the sequence may be DNA or RNA
  source 1..14: mol_type = other RNA
actggagcggggtc

SEQ ID NO: 1730 - RNA, 14 nt, synthetic construct
  variation 1..14: note = Description of Sequence: ASO sequence
  misc_feature 1..14: note = Note: the sequence may be DNA or RNA
  source 1..14: mol_type = other RNA
aactggagcggggt

SEQ ID NO: 1731 - RNA, 14 nt, synthetic construct
  variation 1..14: note = Description of Sequence: ASO sequence
  misc_feature 1..14: note = Note: the sequence may be DNA or RNA
  source 1..14: mol_type = other RNA
aaactggagcgggg

SEQ ID NO: 1732 - RNA, 14 nt, synthetic construct
  variation 1..14: note = Description of Sequence: ASO sequence
  misc_feature 1..14: note = Note: the sequence may be DNA or RNA
  source 1..14: mol_type = other RNA
caaactggagcggg

SEQ ID NO: 1733 - RNA, 14 nt, synthetic construct
  variation 1..14: note = Description of Sequence: ASO sequence
  misc_feature 1..14: note = Note: the sequence may be DNA or RNA
  source 1..14: mol_type = other RNA
ccaaactggagcgg

SEQ ID NO: 1734 - RNA, 14 nt, synthetic construct
  variation 1..14: note = Description of Sequence: ASO sequence
  misc_feature 1..14: note = Note: the sequence may be DNA or RNA
  source 1..14: mol_type = other RNA
cccaaactggagcg

SEQ ID NO: 1735 - RNA, 14 nt, synthetic construct
  variation 1..14: note = Description of Sequence: ASO sequence
  misc_feature 1..14: note = Note: the sequence may be DNA or RNA
  source 1..14: mol_type = other RNA
tcccaaactggagc

SEQ ID NO: 1736 - RNA, 14 nt, synthetic construct
  variation 1..14: note = Description of Sequence: ASO sequence
  misc_feature 1..14: note = Note: the sequence may be DNA or RNA
  source 1..14: mol_type = other RNA
ttcccaaactggag

SEQ ID NO: 1737 - RNA, 14 nt, synthetic construct
  variation 1..14: note = Description of Sequence: ASO sequence
  misc_feature 1..14: note = Note: the sequence may be DNA or RNA
  source 1..14: mol_type = other RNA
gttcccaaactgga

SEQ ID NO: 1738 - RNA, 14 nt, synthetic construct
  variation 1..14: note = Description of Sequence: ASO sequence
  misc_feature 1..14: note = Note: the sequence may be DNA or RNA
  source 1..14: mol_type = other RNA
ggttcccaaactgg

SEQ ID NO: 1739 - RNA, 14 nt, synthetic construct
  variation 1..14: note = Description of Sequence: ASO sequence
  misc_feature 1..14: note = Note: the sequence may be DNA or RNA
  source 1..14: mol_type = other RNA
aggttcccaaactg

SEQ ID NO: 1740 - RNA, 14 nt, synthetic construct
  variation 1..14: note = Description of Sequence: ASO sequence
  misc_feature 1..14: note = Note: the sequence may be DNA or RNA
  source 1..14: mol_type = other RNA
caggttcccaaact

SEQ ID NO: 1741 - RNA, 14 nt, synthetic construct
  variation 1..14: note = Description of Sequence: ASO sequence
  misc_feature 1..14: note = Note: the sequence may be DNA or RNA
  source 1..14: mol_type = other RNA
gcaggttcccaaac

SEQ ID NO: 1742 - RNA, 14 nt, synthetic construct
  variation 1..14: note = Description of Sequence: ASO sequence
  misc_feature 1..14: note = Note: the sequence may be DNA or RNA
  source 1..14: mol_type = other RNA
tgcaggttcccaaa

SEQ ID NO: 1743 - RNA, 14 nt, synthetic construct
  variation 1..14: note = Description of Sequence: ASO sequence
  misc_feature 1..14: note = Note: the sequence may be DNA or RNA
  source 1..14: mol_type = other RNA
ctgcaggttcccaa

SEQ ID NO: 1744 - RNA, 14 nt, synthetic construct
  variation 1..14: note = Description of Sequence: ASO sequence
  misc_feature 1..14: note = Note: the sequence may be DNA or RNA
  source 1..14: mol_type = other RNA
tctgcaggttccca

SEQ ID NO: 1745 - RNA, 14 nt, synthetic construct
  variation 1..14: note = Description of Sequence: ASO sequence
  misc_feature 1..14: note = Note: the sequence may be DNA or RNA
  source 1..14: mol_type = other RNA
ttctgcaggttccc

SEQ ID NO: 1746 - RNA, 14 nt, synthetic construct
  variation 1..14: note = Description of Sequence: ASO sequence
  misc_feature 1..14: note = Note: the sequence may be DNA or RNA
  source 1..14: mol_type = other RNA
cttctgcaggttcc

SEQ ID NO: 1747 - RNA, 14 nt, synthetic construct
  variation 1..14: note = Description of Sequence: ASO sequence
  misc_feature 1..14: note = Note: the sequence may be DNA or RNA
  source 1..14: mol_type = other RNA
acttctgcaggttc

SEQ ID NO: 1748 - RNA, 14 nt, synthetic construct
  variation 1..14: note = Description of Sequence: ASO sequence
  misc_feature 1..14: note = Note: the sequence may be DNA or RNA
  source 1..14: mol_type = other RNA
aacttctgcaggtt

SEQ ID NO: 1749 - RNA, 14 nt, synthetic construct
  variation 1..14: note = Description of Sequence: ASO sequence
  misc_feature 1..14: note = Note: the sequence may be DNA or RNA
  source 1..14: mol_type = other RNA
caacttctgcaggt

SEQ ID NO: 1750 - RNA, 14 nt, synthetic construct
  variation 1..14: note = Description of Sequence: ASO sequence
  misc_feature 1..14: note = Note: the sequence may be DNA or RNA
  source 1..14: mol_type = other RNA
ccaacttctgcagg

SEQ ID NO: 1751 - RNA, 14 nt, synthetic construct
  variation 1..14: note = Description of Sequence: ASO sequence
  misc_feature 1..14: note = Note: the sequence may be DNA or RNA
  source 1..14: mol_type = other RNA
tccaacttctgcag

SEQ ID NO: 1752 - RNA, 14 nt, synthetic construct
  variation 1..14: note = Description of Sequence: ASO sequence
  misc_feature 1..14: note = Note: the sequence may be DNA or RNA
  source 1..14: mol_type = other RNA
atccaacttctgca

SEQ ID NO: 1753 - RNA, 14 nt, synthetic construct
  variation 1..14: note = Description of Sequence: ASO sequence
  misc_feature 1..14: note = Note: the sequence may be DNA or RNA
  source 1..14: mol_type = other RNA
catccaacttctgc

SEQ ID NO: 1754 - RNA, 14 nt, synthetic construct
  variation 1..14: note = Description of Sequence: ASO sequence
  misc_feature 1..14: note = Note: the sequence may be DNA or RNA
  source 1..14: mol_type = other RNA
ccatccaacttctg

SEQ ID NO: 1755 - RNA, 14 nt, synthetic construct
  variation 1..14: note = Description of Sequence: ASO sequence
  misc_feature 1..14: note = Note: the sequence may be DNA or RNA
  source 1..14: mol_type = other RNA
cccatccaacttct

SEQ ID NO: 1756 - RNA, 14 nt, synthetic construct
  variation 1..14: note = Description of Sequence: ASO sequence
  misc_feature 1..14: note = Note: the sequence may be DNA or RNA
  source 1..14: mol_type = other RNA
gcccatccaacttc

SEQ ID NO: 1757 - RNA, 14 nt, synthetic construct
  variation 1..14: note = Description of Sequence: ASO sequence
  misc_feature 1..14: note = Note: the sequence may be DNA or RNA
  source 1..14: mol_type = other RNA
ggcccatccaactt

SEQ ID NO: 1758 - RNA, 14 nt, synthetic construct
  variation 1..14: note = Description of Sequence: ASO sequence
  misc_feature 1..14: note = Note: the sequence may be DNA or RNA
  source 1..14: mol_type = other RNA
gggcccatccaact

SEQ ID NO: 1759 - RNA, 14 nt, synthetic construct
  variation 1..14: note = Description of Sequence: ASO sequence
  misc_feature 1..14: note = Note: the sequence may be DNA or RNA
  source 1..14: mol_type = other RNA
tgggcccatccaac

SEQ ID NO: 1760 - RNA, 14 nt, synthetic construct
  variation 1..14: note = Description of Sequence: ASO sequence
  misc_feature 1..14: note = Note: the sequence may be DNA or RNA
  source 1..14: mol_type = other RNA
gtgggcccatccaa

SEQ ID NO: 1761 - RNA, 14 nt, synthetic construct
  variation 1..14: note = Description of Sequence: ASO sequence
  misc_feature 1..14: note = Note: the sequence may be DNA or RNA
  source 1..14: mol_type = other RNA
cgtgggcccatcca

SEQ ID NO: 1762 - RNA, 14 nt, synthetic construct
  variation 1..14: note = Description of Sequence: ASO sequence
  misc_feature 1..14: note = Note: the sequence may be DNA or RNA
  source 1..14: mol_type = other RNA
ccgtgggcccatcc

SEQ ID NO: 1763 - RNA, 14 nt, synthetic construct
  variation 1..14: note = Description of Sequence: ASO sequence
  misc_feature 1..14: note = Note: the sequence may be DNA or RNA
  source 1..14: mol_type = other RNA
tccgtgggcccatc

SEQ ID NO: 1764 - RNA, 14 nt, synthetic construct
  variation 1..14: note = Description of Sequence: ASO sequence
  misc_feature 1..14: note = Note: the sequence may be DNA or RNA
  source 1..14: mol_type = other RNA
ctccgtgggcccat

SEQ ID NO: 1765 - RNA, 14 nt, synthetic construct
  variation 1..14: note = Description of Sequence: ASO sequence
  misc_feature 1..14: note = Note: the sequence may be DNA or RNA
  source 1..14: mol_type = other RNA
gctccgtgggccca

SEQ ID NO: 1766 - RNA, 14 nt, synthetic construct
  variation 1..14: note = Description of Sequence: ASO sequence
  misc_feature 1..14: note = Note: the sequence may be DNA or RNA
  source 1..14: mol_type = other RNA
tgctccgtgggccc

SEQ ID NO: 1767 - RNA, 14 nt, synthetic construct
  variation 1..14: note = Description of Sequence: ASO sequence
  misc_feature 1..14: note = Note: the sequence may be DNA or RNA
  source 1..14: mol_type = other RNA
ctgctccgtgggcc

SEQ ID NO: 1768 - RNA, 14 nt, synthetic construct
  variation 1..14: note = Description of Sequence: ASO sequence
  misc_feature 1..14: note = Note: the sequence may be DNA or RNA
  source 1..14: mol_type = other RNA
actgctccgtgggc

SEQ ID NO: 1769 - RNA, 14 nt, synthetic construct
  variation 1..14: note = Description of Sequence: ASO sequence
  misc_feature 1..14: note = Note: the sequence may be DNA or RNA
  source 1..14: mol_type = other RNA
cactgctccgtggg

SEQ ID NO: 1770 - RNA, 14 nt, synthetic construct
  variation 1..14: note = Description of Sequence: ASO sequence
  misc_feature 1..14: note = Note: the sequence may be DNA or RNA
  source 1..14: mol_type = other RNA
gcactgctccgtgg

SEQ ID NO: 1771 - RNA, 14 nt, synthetic construct
  variation 1..14: note = Description of Sequence: ASO sequence
  misc_feature 1..14: note = Note: the sequence may be DNA or RNA
  source 1..14: mol_type = other RNA
ggcactgctccgtg

SEQ ID NO: 1772 - RNA, 14 nt, synthetic construct
  variation 1..14: note = Description of Sequence: ASO sequence
  misc_feature 1..14: note = Note: the sequence may be DNA or RNA
  source 1..14: mol_type = other RNA
gggcactgctccgt

SEQ ID NO: 1773 - RNA, 14 nt, synthetic construct
  variation 1..14: note = Description of Sequence: ASO sequence
  misc_feature 1..14: note = Note: the sequence may be DNA or RNA
  source 1..14: mol_type = other RNA
cgggcactgctccg

SEQ ID NO: 1774 - RNA, 14 nt, synthetic construct
  variation 1..14: note = Description of Sequence: ASO sequence
  misc_feature 1..14: note = Note: the sequence may be DNA or RNA
  source 1..14: mol_type = other RNA
ccgggcactgctcc

SEQ ID NO: 1775 - RNA, 14 nt, synthetic construct
  variation 1..14: note = Description of Sequence: ASO sequence
  misc_feature 1..14: note = Note: the sequence may be DNA or RNA
  source 1..14: mol_type = other RNA
tccgggcactgctc

SEQ ID NO: 1776 - RNA, 14 nt, synthetic construct
  variation 1..14: note = Description of Sequence: ASO sequence
  misc_feature 1..14: note = Note: the sequence may be DNA or RNA
  source 1..14: mol_type = other RNA
gtccgggcactgct

SEQ ID NO: 1777 - RNA, 14 nt, synthetic construct
  variation 1..14: note = Description of Sequence: ASO sequence
  misc_feature 1..14: note = Note: the sequence may be DNA or RNA
  source 1..14: mol_type = other RNA
ggtccgggcactgc

SEQ ID NO: 1778 - RNA, 14 nt, synthetic construct
  variation 1..14: note = Description of Sequence: ASO sequence
  misc_feature 1..14: note = Note: the sequence may be DNA or RNA
  source 1..14: mol_type = other RNA
gggtccgggcactg

SEQ ID NO: 1779 - RNA, 14 nt, synthetic construct
  variation 1..14: note = Description of Sequence: ASO sequence
  misc_feature 1..14: note = Note: the sequence may be DNA or RNA
  source 1..14: mol_type = other RNA
cgggtccgggcact

SEQ ID NO: 1780 - RNA, 14 nt, synthetic construct
  variation 1..14: note = Description of Sequence: ASO sequence
  misc_feature 1..14: note = Note: the sequence may be DNA or RNA
  source 1..14: mol_type = other RNA
gcgggtccgggcac

SEQ ID NO: 1781 - RNA, 14 nt, synthetic construct
  variation 1..14: note = Description of Sequence: ASO sequence
  misc_feature 1..14: note = Note: the sequence may be DNA or RNA
  source 1..14: mol_type = other RNA
agcgggtccgggca

SEQ ID NO: 1782 - RNA, 14 nt, synthetic construct
  variation 1..14: note = Description of Sequence: ASO sequence
  misc_feature 1..14: note = Note: the sequence may be DNA or RNA
  source 1..14: mol_type = other RNA
cagcgggtccgggc

SEQ ID NO: 1783 - RNA, 14 nt, synthetic construct
  variation 1..14: note = Description of Sequence: ASO sequence
  misc_feature 1..14: note = Note: the sequence may be DNA or RNA
  source 1..14: mol_type = other RNA
gcagcgggtccggg

SEQ ID NO: 1784 - RNA, 14 nt, synthetic construct
  variation 1..14: note = Description of Sequence: ASO sequence
  misc_feature 1..14: note = Note: the sequence may be DNA or RNA
  source 1..14: mol_type = other RNA
ggcagcgggtccgg

SEQ ID NO: 1785 - RNA, 14 nt, synthetic construct
  variation 1..14: note = Description of Sequence: ASO sequence
  misc_feature 1..14: note = Note: the sequence may be DNA or RNA
  source 1..14: mol_type = other RNA
gggcagcgggtccg

SEQ ID NO: 1786 - RNA, 14 nt, synthetic construct
  variation 1..14: note = Description of Sequence: ASO sequence
  misc_feature 1..14: note = Note: the sequence may be DNA or RNA
  source 1..14: mol_type = other RNA
agggcagcgggtcc

SEQ ID NO: 1787 - RNA, 14 nt, synthetic construct
  variation 1..14: note = Description of Sequence: ASO sequence
  misc_feature 1..14: note = Note: the sequence may be DNA or RNA
  source 1..14: mol_type = other RNA
aagggcagcgggtc

SEQ ID NO: 1788 - RNA, 14 nt, synthetic construct
  variation 1..14: note = Description of Sequence: ASO sequence
  misc_feature 1..14: note = Note: the sequence may be DNA or RNA
  source 1..14: mol_type = other RNA
caagggcagcgggt

SEQ ID NO: 1789 - RNA, 14 nt, synthetic construct
  variation 1..14: note = Description of Sequence: ASO sequence
  misc_feature 1..14: note = Note: the sequence may be DNA or RNA
  source 1..14: mol_type = other RNA
gcaagggcagcggg

SEQ ID NO: 1790 - RNA, 14 nt, synthetic construct
  variation 1..14: note = Description of Sequence: ASO sequence
  misc_feature 1..14: note = Note: the sequence may be DNA or RNA
  source 1..14: mol_type = other RNA
ggcaagggcagcgg

SEQ ID NO: 1791 - RNA, 14 nt, synthetic construct
  variation 1..14: note = Description of Sequence: ASO sequence
  misc_feature 1..14: note = Note: the sequence may be DNA or RNA
  source 1..14: mol_type = other RNA
cggcaagggcagcg

SEQ ID NO: 1792 - RNA, 14 nt, synthetic construct
  variation 1..14: note = Description of Sequence: ASO sequence
  misc_feature 1..14: note = Note: the sequence may be DNA or RNA
  source 1..14: mol_type = other RNA
ccggcaagggcagc

SEQ ID NO: 1793 - RNA, 14 nt, synthetic construct
  variation 1..14: note = Description of Sequence: ASO sequence
  misc_feature 1..14: note = Note: the sequence may be DNA or RNA
  source 1..14: mol_type = other RNA
gccggcaagggcag

SEQ ID NO: 1794 - RNA, 14 nt, synthetic construct
  variation 1..14: note = Description of Sequence: ASO sequence
  misc_feature 1..14: note = Note: the sequence may be DNA or RNA
  source 1..14: mol_type = other RNA
ggccggcaagggca

SEQ ID NO: 1795 - RNA, 14 nt, synthetic construct
  variation 1..14: note = Description of Sequence: ASO sequence
  misc_feature 1..14: note = Note: the sequence may be DNA or RNA
  source 1..14: mol_type = other RNA
cggccggcaagggc

SEQ ID NO: 1796 - RNA, 14 nt, synthetic construct
  variation 1..14: note = Description of Sequence: ASO sequence
  misc_feature 1..14: note = Note: the sequence may be DNA or RNA
  source 1..14: mol_type = other RNA
ccggccggcaaggg

SEQ ID NO: 1797 - RNA, 14 nt, synthetic construct
  variation 1..14: note = Description of Sequence: ASO sequence
  misc_feature 1..14: note = Note: the sequence may be DNA or RNA
  source 1..14: mol_type = other RNA
gccggccggcaagg

SEQ ID NO: 1798 - RNA, 14 nt, synthetic construct
  variation 1..14: note = Description of Sequence: ASO sequence
  misc_feature 1..14: note = Note: the sequence may be DNA or RNA
  source 1..14: mol_type = other RNA
tgccggccggcaag

SEQ ID NO: 1799 - RNA, 14 nt, synthetic construct
  variation 1..14: note = Description of Sequence: ASO sequence
  misc_feature 1..14: note = Note: the sequence may be DNA or RNA
  source 1..14: mol_type = other RNA
ttgccggccggcaa

SEQ ID NO: 1800 - RNA, 14 nt, synthetic construct
  variation 1..14: note = Description of Sequence: ASO sequence
  misc_feature 1..14: note = Note: the sequence may be DNA or RNA
  source 1..14: mol_type = other RNA
gttgccggccggca

SEQ ID NO: 1801 - RNA, 14 nt, synthetic construct
  variation 1..14: note = Description of Sequence: ASO sequence
  misc_feature 1..14: note = Note: the sequence may be DNA or RNA
  source 1..14: mol_type = other RNA
agttgccggccggc

SEQ ID NO: 1802 - RNA, 14 nt, synthetic construct
  variation 1..14: note = Description of Sequence: ASO sequence
  misc_feature 1..14: note = Note: the sequence may be DNA or RNA
  source 1..14: mol_type = other RNA
cagttgccggccgg

SEQ ID NO: 1803 - RNA, 14 nt, synthetic construct
  variation 1..14: note = Description of Sequence: ASO sequence
  misc_feature 1..14: note = Note: the sequence may be DNA or RNA
  source 1..14: mol_type = other RNA
gcagttgccggccg

SEQ ID NO: 1804 - RNA, 14 nt, synthetic construct
  variation 1..14: note = Description of Sequence: ASO sequence
  misc_feature 1..14: note = Note: the sequence may be DNA or RNA
  source 1..14: mol_type = other RNA
tgcagttgccggcc

SEQ ID NO: 1805 - RNA, 14 nt, synthetic construct
  variation 1..14: note = Description of Sequence: ASO sequence
  misc_feature 1..14: note = Note: the sequence may be DNA or RNA
  source 1..14: mol_type = other RNA
gtgcagttgccggc

SEQ ID NO: 1806 - RNA, 14 nt, synthetic construct
  variation 1..14: note = Description of Sequence: ASO sequence
  misc_feature 1..14: note = Note: the sequence may be DNA or RNA
  source 1..14: mol_type = other RNA
cgtgcagttgccgg

SEQ ID NO: 1807 - RNA, 14 nt, synthetic construct
  variation 1..14: note = Description of Sequence: ASO sequence
  misc_feature 1..14: note = Note: the sequence may be DNA or RNA
  source 1..14: mol_type = other RNA
ccgtgcagttgccg

SEQ ID NO: 1808 - RNA, 14 nt, synthetic construct
  variation 1..14: note = Description of Sequence: ASO sequence
  misc_feature 1..14: note = Note: the sequence may be DNA or RNA
  source 1..14: mol_type = other RNA
tccgtgcagttgcc

SEQ ID NO: 1809 - RNA, 14 nt, synthetic construct
  variation 1..14: note = Description of Sequence: ASO sequence
  misc_feature 1..14: note = Note: the sequence may be DNA or RNA
  source 1..14: mol_type = other RNA
gtccgtgcagttgc

SEQ ID NO: 1810 - RNA, 14 nt, synthetic construct
  variation 1..14: note = Description of Sequence: ASO sequence
  misc_feature 1..14: note = Note: the sequence may be DNA or RNA
  source 1..14: mol_type = other RNA
cgtccgtgcagttg

SEQ ID NO: 1811 - RNA, 14 nt, synthetic construct
  variation 1..14: note = Description of Sequence: ASO sequence
  misc_feature 1..14: note = Note: the sequence may be DNA or RNA
  source 1..14: mol_type = other RNA
tcgtccgtgcagtt

SEQ ID NO: 1812 - RNA, 14 nt, synthetic construct
  variation 1..14: note = Description of Sequence: ASO sequence
  misc_feature 1..14: note = Note: the sequence may be DNA or RNA
  source 1..14: mol_type = other RNA
ctcgtccgtgcagt

SEQ ID NO: 1813 - RNA, 14 nt, synthetic construct
  variation 1..14: note = Description of Sequence: ASO sequence
  misc_feature 1..14: note = Note: the sequence may be DNA or RNA
  source 1..14: mol_type = other RNA
tggcagatgccctc

SEQ ID NO: 1814 - RNA, 14 nt, synthetic construct
  variation 1..14: note = Description of Sequence: ASO sequence
  misc_feature 1..14: note = Note: the sequence may be DNA or RNA
  source 1..14: mol_type = other RNA
gtggcagatgccct

SEQ ID NO: 1815 - RNA, 14 nt, synthetic construct
  variation 1..14: note = Description of Sequence: ASO sequence
  misc_feature 1..14: note = Note: the sequence may be DNA or RNA
  source 1..14: mol_type = other RNA
ggtggcagatgccc

SEQ ID NO: 1816 - RNA, 14 nt, synthetic construct
  variation 1..14: note = Description of Sequence: ASO sequence
  misc_feature 1..14: note = Note: the sequence may be DNA or RNA
  source 1..14: mol_type = other RNA
cggtggcagatgcc

SEQ ID NO: 1817 - RNA, 14 nt, synthetic construct
  variation 1..14: note = Description of Sequence: ASO sequence
  misc_feature 1..14: note = Note: the sequence may be DNA or RNA
  source 1..14: mol_type = other RNA
gcggtggcagatgc

SEQ ID NO: 1818 - RNA, 14 nt, synthetic construct
  variation 1..14: note = Description of Sequence: ASO sequence
  misc_feature 1..14: note = Note: the sequence may be DNA or RNA
  source 1..14: mol_type = other RNA
tgcggtggcagatg

SEQ ID NO: 1819 - RNA, 14 nt, synthetic construct
  variation 1..14: note = Description of Sequence: ASO sequence
  misc_feature 1..14: note = Note: the sequence may be DNA or RNA
  source 1..14: mol_type = other RNA
gtgcggtggcagat

SEQ ID NO: 1820 - RNA, 14 nt, synthetic construct
  variation 1..14: note = Description of Sequence: ASO sequence
  misc_feature 1..14: note = Note: the sequence may be DNA or RNA
  source 1..14: mol_type = other RNA
ggtgcggtggcaga

SEQ ID NO: 1821 - RNA, 14 nt, synthetic construct
  variation 1..14: note = Description of Sequence: ASO sequence
  misc_feature 1..14: note = Note: the sequence may be DNA or RNA
  source 1..14: mol_type = other RNA
gggtgcggtggcag

SEQ ID NO: 1822 - RNA, 14 nt, synthetic construct
  variation 1..14: note = Description of Sequence: ASO sequence
  misc_feature 1..14: note = Note: the sequence may be DNA or RNA
  source 1..14: mol_type = other RNA
agggtgcggtggca

SEQ ID NO: 1823 - RNA, 14 nt, synthetic construct
  variation 1..14: note = Description of Sequence: ASO sequence
  misc_feature 1..14: note = Note: the sequence may be DNA or RNA
  source 1..14: mol_type = other RNA
cagggtgcggtggc

SEQ ID NO: 1824 - RNA, 14 nt, synthetic construct
  variation 1..14: note = Description of Sequence: ASO sequence
  misc_feature 1..14: note = Note: the sequence may be DNA or RNA
  source 1..14: mol_type = other RNA
gcagggtgcggtgg

SEQ ID NO: 1825 - RNA, 14 nt, synthetic construct
  variation 1..14: note = Description of Sequence: ASO sequence
  misc_feature 1..14: note = Note: the sequence may be DNA or RNA
  source 1..14: mol_type = other RNA
agcagggtgcggtg

SEQ ID NO: 1826 - RNA, 14 nt, synthetic construct
  variation 1..14: note = Description of Sequence: ASO sequence
  misc_feature 1..14: note = Note: the sequence may be DNA or RNA
  source 1..14: mol_type = other RNA
cagcagggtgcggt

SEQ ID NO: 1827 - RNA, 14 nt, synthetic construct
  variation 1..14: note = Description of Sequence: ASO sequence
  misc_feature 1..14: note = Note: the sequence may be DNA or RNA
  source 1..14: mol_type = other RNA
ccagcagggtgcgg

SEQ ID NO: 1828 - RNA, 14 nt, synthetic construct
  variation 1..14: note = Description of Sequence: ASO sequence
  misc_feature 1..14: note = Note: the sequence may be DNA or RNA
  source 1..14: mol_type = other RNA
cccagcagggtgcg

SEQ ID NO: 1829 - RNA, 14 nt, synthetic construct
  variation 1..14: note = Description of Sequence: ASO sequence
  misc_feature 1..14: note = Note: the sequence may be DNA or RNA
  source 1..14: mol_type = other RNA
ccccagcagggtgc

SEQ ID NO: 1830 - RNA, 14 nt, synthetic construct
  variation 1..14: note = Description of Sequence: ASO sequence
  misc_feature 1..14: note = Note: the sequence may be DNA or RNA
  source 1..14: mol_type = other RNA
gccccagcagggtg

SEQ ID NO: 1831 - RNA, 14 nt, synthetic construct
  variation 1..14: note = Description of Sequence: ASO sequence
  misc_feature 1..14: note = Note: the sequence may be DNA or RNA
  source 1..14: mol_type = other RNA
ggccccagcagggt

SEQ ID NO: 1832 - RNA, 14 nt, synthetic construct
  variation 1..14: note = Description of Sequence: ASO sequence
  misc_feature 1..14: note = Note: the sequence may be DNA or RNA
  source 1..14: mol_type = other RNA
cggccccagcaggg

SEQ ID NO: 1833 - RNA, 14 nt, synthetic construct
  variation 1..14: note = Description of Sequence: ASO sequence
  misc_feature 1..14: note = Note: the sequence may be DNA or RNA
  source 1..14: mol_type = other RNA
ccggccccagcagg

SEQ ID NO: 1834 - RNA, 14 nt, synthetic construct
  variation 1..14: note = Description of Sequence: ASO sequence
  misc_feature 1..14: note = Note: the sequence may be DNA or RNA
  source 1..14: mol_type = other RNA
gccggccccagcag

SEQ ID NO: 1835 - RNA, 14 nt, synthetic construct
  variation 1..14: note = Description of Sequence: ASO sequence
  misc_feature 1..14: note = Note: the sequence may be DNA or RNA
  source 1..14: mol_type = other RNA
ggccggccccagca

SEQ ID NO: 1836 - RNA, 14 nt, synthetic construct
  variation 1..14: note = Description of Sequence: ASO sequence
  misc_feature 1..14: note = Note: the sequence may be DNA or RNA
  source 1..14: mol_type = other RNA
aggccggccccagc

SEQ ID NO: 1837 - RNA, 14 nt, synthetic construct
  variation 1..14: note = Description of Sequence: ASO sequence
  misc_feature 1..14: note = Note: the sequence may be DNA or RNA
  source 1..14: mol_type = other RNA
aaggccggccccag

SEQ ID NO: 1838 - RNA, 14 nt, synthetic construct
  variation 1..14: note = Description of Sequence: ASO sequence
  misc_feature 1..14: note = Note: the sequence may be DNA or RNA
  source 1..14: mol_type = other RNA
aaaggccggcccca

SEQ ID NO: 1839 - RNA, 14 nt, synthetic construct
  variation 1..14: note = Description of Sequence: ASO sequence
  misc_feature 1..14: note = Note: the sequence may be DNA or RNA
  source 1..14: mol_type = other RNA
caaaggccggcccc

SEQ ID NO: 1840 - RNA, 14 nt, synthetic construct
  variation 1..14: note = Description of Sequence: ASO sequence
  misc_feature 1..14: note = Note: the sequence may be DNA or RNA
  source 1..14: mol_type = other RNA
gcaaaggccggccc

SEQ ID NO: 1841 - RNA, 14 nt, synthetic construct
  variation 1..14: note = Description of Sequence: ASO sequence
  misc_feature 1..14: note = Note: the sequence may be DNA or RNA
  source 1..14: mol_type = other RNA
cgcaaaggccggcc

SEQ ID NO: 1842 - RNA, 14 nt, synthetic construct
  variation 1..14: note = Description of Sequence: ASO sequence
  misc_feature 1..14: note = Note: the sequence may be DNA or RNA
  source 1..14: mol_type = other RNA
ccgcaaaggccggc

SEQ ID NO: 1843 - RNA, 14 nt, synthetic construct
  variation 1..14: note = Description of Sequence: ASO sequence
  misc_feature 1..14: note = Note: the sequence may be DNA or RNA
  source 1..14: mol_type = other RNA
tccgcaaaggccgg

SEQ ID NO: 1844 - RNA, 14 nt, synthetic construct
  variation 1..14: note = Description of Sequence: ASO sequence
  misc_feature 1..14: note = Note: the sequence may be DNA or RNA
  source 1..14: mol_type = other RNA
ctccgcaaaggccg

SEQ ID NO: 1845 - RNA, 14 nt, synthetic construct
  variation 1..14: note = Description of Sequence: ASO sequence
  misc_feature 1..14: note = Note: the sequence may be DNA or RNA
  source 1..14: mol_type = other RNA
actccgcaaaggcc

SEQ ID NO: 1846 - RNA, 14 nt, synthetic construct
  variation 1..14: note = Description of Sequence: ASO sequence
  misc_feature 1..14: note = Note: the sequence may be DNA or RNA
  source 1..14: mol_type = other RNA
cactccgcaaaggc

SEQ ID NO: 1847 - RNA, 14 nt, synthetic construct
  variation 1..14: note = Description of Sequence: ASO sequence
  misc_feature 1..14: note = Note: the sequence may be DNA or RNA
  source 1..14: mol_type = other RNA
gcactccgcaaagg

SEQ ID NO: 1848 - RNA, 14 nt, synthetic construct
  variation 1..14: note = Description of Sequence: ASO sequence
  misc_feature 1..14: note = Note: the sequence may be DNA or RNA
  source 1..14: mol_type = other RNA
ggcactccgcaaag

SEQ ID NO: 1849 - RNA, 14 nt, synthetic construct
  variation 1..14: note = Description of Sequence: ASO sequence
  misc_feature 1..14: note = Note: the sequence may be DNA or RNA
  source 1..14: mol_type = other RNA
tggcactccgcaaa

SEQ ID NO: 1850 - RNA, 14 nt, synthetic construct
  variation 1..14: note = Description of Sequence: ASO sequence
  misc_feature 1..14: note = Note: the sequence may be DNA or RNA
  source 1..14: mol_type = other RNA
gtggcactccgcaa

SEQ ID NO: 1851 - RNA, 14 nt, synthetic construct
  variation 1..14: note = Description of Sequence: ASO sequence
  misc_feature 1..14: note = Note: the sequence may be DNA or RNA
  source 1..14: mol_type = other RNA
cgtggcactccgca

SEQ ID NO: 1852 - RNA, 14 nt, synthetic construct
  variation 1..14: note = Description of Sequence: ASO sequence
  misc_feature 1..14: note = Note: the sequence may be DNA or RNA
  source 1..14: mol_type = other RNA
gcgtggcactccgc

SEQ ID NO: 1853 - RNA, 14 nt, synthetic construct
  variation 1..14: note = Description of Sequence: ASO sequence
  misc_feature 1..14: note = Note: the sequence may be DNA or RNA
  source 1..14: mol_type = other RNA
tgcgtggcactccg

SEQ ID NO: 1854 - RNA, 14 nt, synthetic construct
  variation 1..14: note = Description of Sequence: ASO sequence
  misc_feature 1..14: note = Note: the sequence may be DNA or RNA
  source 1..14: mol_type = other RNA
gtgcgtggcactcc

SEQ ID NO: 1855 - RNA, 14 nt, synthetic construct
  variation 1..14: note = Description of Sequence: ASO sequence
  misc_feature 1..14: note = Note: the sequence may be DNA or RNA
  source 1..14: mol_type = other RNA
agtgcgtggcactc

SEQ ID NO: 1856 - RNA, 14 nt, synthetic construct
  variation 1..14: note = Description of Sequence: ASO sequence
  misc_feature 1..14: note = Note: the sequence may be DNA or RNA
  source 1..14: mol_type = other RNA
cagtgcgtggcact

SEQ ID NO: 1857 - RNA, 14 nt, synthetic construct
  variation 1..14: note = Description of Sequence: ASO sequence
  misc_feature 1..14: note = Note: the sequence may be DNA or RNA
  source 1..14: mol_type = other RNA
ccagtgcgtggcac

SEQ ID NO: 1858 - RNA, 14 nt, synthetic construct
  variation 1..14: note = Description of Sequence: ASO sequence
  misc_feature 1..14: note = Note: the sequence may be DNA or RNA
  source 1..14: mol_type = other RNA
accagtgcgtggca

SEQ ID NO: 1859 - RNA, 14 nt, synthetic construct
  variation 1..14: note = Description of Sequence: ASO sequence
  misc_feature 1..14: note = Note: the sequence may be DNA or RNA
  source 1..14: mol_type = other RNA
caccagtgcgtggc

SEQ ID NO: 1860 - RNA, 14 nt, synthetic construct
  variation 1..14: note = Description of Sequence: ASO sequence
  misc_feature 1..14: note = Note: the sequence may be DNA or RNA
  source 1..14: mol_type = other RNA
ccaccagtgcgtgg

SEQ ID NO: 1861 - RNA, 14 nt, synthetic construct
  variation 1..14: note = Description of Sequence: ASO sequence
  misc_feature 1..14: note = Note: the sequence may be DNA or RNA
  source 1..14: mol_type = other RNA
tccaccagtgcgtg

SEQ ID NO: 1862 - RNA, 14 nt, synthetic construct
  variation 1..14: note = Description of Sequence: ASO sequence
  misc_feature 1..14: note = Note: the sequence may be DNA or RNA
  source 1..14: mol_type = other RNA
gtccaccagtgcgt

SEQ ID NO: 1863 - RNA, 14 nt, synthetic construct
  variation 1..14: note = Description of Sequence: ASO sequence
  misc_feature 1..14: note = Note: the sequence may be DNA or RNA
  source 1..14: mol_type = other RNA
tgtccaccagtgcg

SEQ ID NO: 1864 - RNA, 14 nt, synthetic construct
  variation 1..14: note = Description of Sequence: ASO sequence
  misc_feature 1..14: note = Note: the sequence may be DNA or RNA
  source 1..14: mol_type = other RNA
ctgtccaccagtgc

SEQ ID NO: 1865 - RNA, 14 nt, synthetic construct
  variation 1..14: note = Description of Sequence: ASO sequence
  misc_feature 1..14: note = Note: the sequence may be DNA or RNA
  source 1..14: mol_type = other RNA
gctgtccaccagtg

SEQ ID NO: 1866 - RNA, 14 nt, synthetic construct
  variation 1..14: note = Description of Sequence: ASO sequence
  misc_feature 1..14: note = Note: the sequence may be DNA or RNA
  source 1..14: mol_type = other RNA
tgctgtccaccagt

SEQ ID NO: 1867 - RNA, 14 nt, synthetic construct
  variation 1..14: note = Description of Sequence: ASO sequence
  misc_feature 1..14: note = Note: the sequence may be DNA or RNA
  source 1..14: mol_type = other RNA
gtgctgtccaccag

SEQ ID NO: 1868 - RNA, 14 nt, synthetic construct
  variation 1..14: note = Description of Sequence: ASO sequence
  misc_feature 1..14: note = Note: the sequence may be DNA or RNA
  source 1..14: mol_type = other RNA
agtgctgtccacca

SEQ ID NO: 1869 - RNA, 14 nt, synthetic construct
  variation 1..14: note = Description of Sequence: ASO sequence
  misc_feature 1..14: note = Note: the sequence may be DNA or RNA
  source 1..14: mol_type = other RNA
cagtgctgtccacc

SEQ ID NO: 1870 - RNA, 14 nt, synthetic construct
  variation 1..14: note = Description of Sequence: ASO sequence
  misc_feature 1..14: note = Note: the sequence may be DNA or RNA
  source 1..14: mol_type = other RNA
gcagtgctgtccac

SEQ ID NO: 1871 - RNA, 14 nt, synthetic construct
  variation 1..14: note = Description of Sequence: ASO sequence
  misc_feature 1..14: note = Note: the sequence may be DNA or RNA
  source 1..14: mol_type = other RNA
cgcagtgctgtcca

SEQ ID NO: 1872 - RNA, 14 nt, synthetic construct
  variation 1..14: note = Description of Sequence: ASO sequence
  misc_feature 1..14: note = Note: the sequence may be DNA or RNA
  source 1..14: mol_type = other RNA
acgcagtgctgtcc

SEQ ID NO: 1873 - RNA, 14 nt, synthetic construct
  variation 1..14: note = Description of Sequence: ASO sequence
  misc_feature 1..14: note = Note: the sequence may be DNA or RNA
  source 1..14: mol_type = other RNA
tacgcagtgctgtc

SEQ ID NO: 1874 - RNA, 14 nt, synthetic construct
  variation 1..14: note = Description of Sequence: ASO sequence
  misc_feature 1..14: note = Note: the sequence may be DNA or RNA
  source 1..14: mol_type = other RNA
gtacgcagtgctgt

SEQ ID NO: 1875 - RNA, 14 nt, synthetic construct
  variation 1..14: note = Description of Sequence: ASO sequence
  misc_feature 1..14: note = Note: the sequence may be DNA or RNA
  source 1..14: mol_type = other RNA
ggtacgcagtgctg

SEQ ID NO: 1876 - RNA, 14 nt, synthetic construct
  variation 1..14: note = Description of Sequence: ASO sequence
  misc_feature 1..14: note = Note: the sequence may be DNA or RNA
  source 1..14: mol_type = other RNA
aggtacgcagtgct

SEQ ID NO: 1877 - RNA, 14 nt, synthetic construct
  variation 1..14: note = Description of Sequence: ASO sequence
  misc_feature 1..14: note = Note: the sequence may be DNA or RNA
  source 1..14: mol_type = other RNA
caggtacgcagtgc

SEQ ID NO: 1878 - RNA, 14 nt, synthetic construct
  variation 1..14: note = Description of Sequence: ASO sequence
  misc_feature 1..14: note = Note: the sequence may be DNA or RNA
  source 1..14: mol_type = other RNA
ccaggtacgcagtg

SEQ ID NO: 1879 - RNA, 14 nt, synthetic construct
  variation 1..14: note = Description of Sequence: ASO sequence
  misc_feature 1..14: note = Note: the sequence may be DNA or RNA
  source 1..14: mol_type = other RNA
gccaggtacgcagt

SEQ ID NO: 1880 - RNA, 14 nt, synthetic construct
  variation 1..14: note = Description of Sequence: ASO sequence
  misc_feature 1..14: note = Note: the sequence may be DNA or RNA
  source 1..14: mol_type = other RNA
ggccaggtacgcag

SEQ ID NO: 1881 - RNA, 14 nt, synthetic construct
  variation 1..14: note = Description of Sequence: ASO sequence
  misc_feature 1..14: note = Note: the sequence may be DNA or RNA
  source 1..14: mol_type = other RNA
cggccaggtacgca

SEQ ID NO: 1882 - RNA, 14 nt, synthetic construct
  variation 1..14: note = Description of Sequence: ASO sequence
  misc_feature 1..14: note = Note: the sequence may be DNA or RNA
  source 1..14: mol_type = other RNA
gcggccaggtacgc

SEQ ID NO: 1883 - RNA, 14 nt, synthetic construct
  variation 1..14: note = Description of Sequence: ASO sequence
  misc_feature 1..14: note = Note: the sequence may be DNA or RNA
  source 1..14: mol_type = other RNA
ggcggccaggtacg

SEQ ID NO: 1884 - RNA, 14 nt, synthetic construct
  variation 1..14: note = Description of Sequence: ASO sequence
  misc_feature 1..14: note = Note: the sequence may be DNA or RNA
  source 1..14: mol_type = other RNA
aggcggccaggtac

SEQ ID NO: 1885 - RNA, 14 nt, synthetic construct
  variation 1..14: note = Description of Sequence: ASO sequence
  misc_feature 1..14: note = Note: the sequence may be DNA or RNA
  source 1..14: mol_type = other RNA
caggcggccaggta

SEQ ID NO: 1886 - RNA, 14 nt, synthetic construct
  variation 1..14: note = Description of Sequence: ASO sequence
  misc_feature 1..14: note = Note: the sequence may be DNA or RNA
  source 1..14: mol_type = other RNA
gcaggcggccaggt

SEQ ID NO: 1887 - RNA, 14 nt, synthetic construct
  variation 1..14: note = Description of Sequence: ASO sequence
  misc_feature 1..14: note = Note: the sequence may be DNA or RNA
  source 1..14: mol_type = other RNA
cgcaggcggccagg

SEQ ID NO: 1888 - RNA, 14 nt, synthetic construct
  variation 1..14: note = Description of Sequence: ASO sequence
  misc_feature 1..14: note = Note: the sequence may be DNA or RNA
  source 1..14: mol_type = other RNA
gcgcaggcggccag

SEQ ID NO: 1889 - RNA, 14 nt, synthetic construct
  variation 1..14: note = Description of Sequence: ASO sequence
  misc_feature 1..14: note = Note: the sequence may be DNA or RNA
  source 1..14: mol_type = other RNA
ggcgcaggcggcca

SEQ ID NO: 1890 - RNA, 14 nt, synthetic construct
  variation 1..14: note = Description of Sequence: ASO sequence
  misc_feature 1..14: note = Note: the sequence may be DNA or RNA
  source 1..14: mol_type = other RNA
gggcgcaggcggcc

SEQ ID NO: 1891 - RNA, 14 nt, synthetic construct
  variation 1..14: note = Description of Sequence: ASO sequence
  misc_feature 1..14: note = Note: the sequence may be DNA or RNA
  source 1..14: mol_type = other RNA
tgggcgcaggcggc

SEQ ID NO: 1892 - RNA, 14 nt, synthetic construct
  variation 1..14: note = Description of Sequence: ASO sequence
  misc_feature 1..14: note = Note: the sequence may be DNA or RNA
  source 1..14: mol_type = other RNA
ctgggcgcaggcgg

SEQ ID NO: 1893 - RNA, 14 nt, synthetic construct
  variation 1..14: note = Description of Sequence: ASO sequence
  misc_feature 1..14: note = Note: the sequence may be DNA or RNA
  source 1..14: mol_type = other RNA
cctgggcgcaggcg

SEQ ID NO: 1894 - RNA, 14 nt, synthetic construct
  variation 1..14: note = Description of Sequence: ASO sequence
  misc_feature 1..14: note = Note: the sequence may be DNA or RNA
  source 1..14: mol_type = other RNA
tcctgggcgcaggc

SEQ ID NO: 1895 - RNA, 14 nt, synthetic construct
  variation 1..14: note = Description of Sequence: ASO sequence
  misc_feature 1..14: note = Note: the sequence may be DNA or RNA
  source 1..14: mol_type = other RNA
gtcctgggcgcagg

SEQ ID NO: 1896 - RNA, 14 nt, synthetic construct
  variation 1..14: note = Description of Sequence: ASO sequence
  misc_feature 1..14: note = Note: the sequence may be DNA or RNA
  source 1..14: mol_type = other RNA
ggtcctgggcgcag

SEQ ID NO: 1897 - RNA, 14 nt, synthetic construct
  variation 1..14: note = Description of Sequence: ASO sequence
  misc_feature 1..14: note = Note: the sequence may be DNA or RNA
  source 1..14: mol_type = other RNA
aggtcctgggcgca

SEQ ID NO: 1898 - RNA, 14 nt, synthetic construct
  variation 1..14: note = Description of Sequence: ASO sequence
  misc_feature 1..14: note = Note: the sequence may be DNA or RNA
  source 1..14: mol_type = other RNA
caggtcctgggcgc

SEQ ID NO: 1899 - RNA, 14 nt, synthetic construct
  variation 1..14: note = Description of Sequence: ASO sequence
  misc_feature 1..14: note = Note: the sequence may be DNA or RNA
  source 1..14: mol_type = other RNA
acaggtcctgggcg

SEQ ID NO: 1900 - RNA, 14 nt, synthetic construct
  variation 1..14: note = Description of Sequence: ASO sequence
  misc_feature 1..14: note = Note: the sequence may be DNA or RNA
  source 1..14: mol_type = other RNA
cacaggtcctgggc

SEQ ID NO: 1901 - RNA, 14 nt, synthetic construct
  variation 1..14: note = Description of Sequence: ASO sequence
  misc_feature 1..14: note = Note: the sequence may be DNA or RNA
  source 1..14: mol_type = other RNA
gcacaggtcctggg

SEQ ID NO: 1902 - RNA, 14 nt, synthetic construct
  variation 1..14: note = Description of Sequence: ASO sequence
  misc_feature 1..14: note = Note: the sequence may be DNA or RNA
  source 1..14: mol_type = other RNA
ggcacaggtcctgg

SEQ ID NO: 1903 - RNA, 14 nt, synthetic construct
  variation 1..14: note = Description of Sequence: ASO sequence
  misc_feature 1..14: note = Note: the sequence may be DNA or RNA
  source 1..14: mol_type = other RNA
cggcacaggtcctg

SEQ ID NO: 1904 - RNA, 14 nt, synthetic construct
  variation 1..14: note = Description of Sequence: ASO sequence
  misc_feature 1..14: note = Note: the sequence may be DNA or RNA
  source 1..14: mol_type = other RNA
gcggcacaggtcct

SEQ ID NO: 1905 - RNA, 14 nt, synthetic construct
  variation 1..14: note = Description of Sequence: ASO sequence
  misc_feature 1..14: note = Note: the sequence may be DNA or RNA
  source 1..14: mol_type = other RNA
agcggcacaggtcc

SEQ ID NO: 1906 - RNA, 14 nt, synthetic construct
  variation 1..14: note = Description of Sequence: ASO sequence
  misc_feature 1..14: note = Note: the sequence may be DNA or RNA
  source 1..14: mol_type = other RNA
cagcggcacaggtc

SEQ ID NO: 1907 - RNA, 14 nt, synthetic construct
  variation 1..14: note = Description of Sequence: ASO sequence
  misc_feature 1..14: note = Note: the sequence may be DNA or RNA
  source 1..14: mol_type = other RNA
gcagcggcacaggt

SEQ ID NO: 1908 - RNA, 14 nt, synthetic construct
  variation 1..14: note = Description of Sequence: ASO sequence
  misc_feature 1..14: note = Note: the sequence may be DNA or RNA
  source 1..14: mol_type = other RNA
ggcagcggcacagg

SEQ ID NO: 1909 - RNA, 14 nt, synthetic construct
  variation 1..14: note = Description of Sequence: ASO sequence
  misc_feature 1..14: note = Note: the sequence may be DNA or RNA
  source 1..14: mol_type = other RNA
gggcagcggcacag

SEQ ID NO: 1910 - RNA, 14 nt, synthetic construct
  variation 1..14: note = Description of Sequence: ASO sequence
  misc_feature 1..14: note = Note: the sequence may be DNA or RNA
  source 1..14: mol_type = other RNA
ggggcagcggcaca

SEQ ID NO: 1911 - RNA, 14 nt, synthetic construct
  variation 1..14: note = Description of Sequence: ASO sequence
  misc_feature 1..14: note = Note: the sequence may be DNA or RNA
  source 1..14: mol_type = other RNA
tggggcagcggcac

SEQ ID NO: 1912 - RNA, 14 nt, synthetic construct
  variation 1..14: note = Description of Sequence: ASO sequence
  misc_feature 1..14: note = Note: the sequence may be DNA or RNA
  source 1..14: mol_type = other RNA
gtggggcagcggca

SEQ ID NO: 1913 - RNA, 14 nt, synthetic construct
  variation 1..14: note = Description of Sequence: ASO sequence
  misc_feature 1..14: note = Note: the sequence may be DNA or RNA
  source 1..14: mol_type = other RNA
ggtggggcagcggc

SEQ ID NO: 1914 - RNA, 14 nt, synthetic construct
  variation 1..14: note = Description of Sequence: ASO sequence
  misc_feature 1..14: note = Note: the sequence may be DNA or RNA
  source 1..14: mol_type = other RNA
aggtggggcagcgg

SEQ ID NO: 1915 - RNA, 14 nt, synthetic construct
  variation 1..14: note = Description of Sequence: ASO sequence
  misc_feature 1..14: note = Note: the sequence may be DNA or RNA
  source 1..14: mol_type = other RNA
caggtggggcagcg

SEQ ID NO: 1916 - RNA, 14 nt, synthetic construct
  variation 1..14: note = Description of Sequence: ASO sequence
  misc_feature 1..14: note = Note: the sequence may be DNA or RNA
  source 1..14: mol_type = other RNA
gcaggtggggcagc

SEQ ID NO: 1917 - RNA, 14 nt, synthetic construct
  variation 1..14: note = Description of Sequence: ASO sequence
  misc_feature 1..14: note = Note: the sequence may be DNA or RNA
  source 1..14: mol_type = other RNA
ggcaggtggggcag

SEQ ID NO: 1918 - RNA, 14 nt, synthetic construct
  variation 1..14: note = Description of Sequence: ASO sequence
  misc_feature 1..14: note = Note: the sequence may be DNA or RNA
  source 1..14: mol_type = other RNA
gggcaggtggggca

SEQ ID NO: 1919 - RNA, 14 nt, synthetic construct
  variation 1..14: note = Description of Sequence: ASO sequence
  misc_feature 1..14: note = Note: the sequence may be DNA or RNA
  source 1..14: mol_type = other RNA
cgggcaggtggggc

SEQ ID NO: 1920 - RNA, 14 nt, synthetic construct
  variation 1..14: note = Description of Sequence: ASO sequence
  misc_feature 1..14: note = Note: the sequence may be DNA or RNA
  source 1..14: mol_type = other RNA
acgggcaggtgggg

SEQ ID NO: 1921 - RNA, 14 nt, synthetic construct
  variation 1..14: note = Description of Sequence: ASO sequence
  misc_feature 1..14: note = Note: the sequence may be DNA or RNA
  source 1..14: mol_type = other RNA
cacgggcaggtggg

SEQ ID NO: 1922 - RNA, 14 nt, synthetic construct
  variation 1..14: note = Description of Sequence: ASO sequence
  misc_feature 1..14: note = Note: the sequence may be DNA or RNA
  source 1..14: mol_type = other RNA
acacgggcaggtgg

SEQ ID NO: 1923 - RNA, 14 nt, synthetic construct
  variation 1..14: note = Description of Sequence: ASO sequence
  misc_feature 1..14: note = Note: the sequence may be DNA or RNA
  source 1..14: mol_type = other RNA
cacacgggcaggtg

SEQ ID NO: 1924 - RNA, 14 nt, synthetic construct
  variation 1..14: note = Description of Sequence: ASO sequence
  misc_feature 1..14: note = Note: the sequence may be DNA or RNA
  source 1..14: mol_type = other RNA
gcacacgggcaggt

SEQ ID NO: 1925 - RNA, 14 nt, synthetic construct
  variation 1..14: note = Description of Sequence: ASO sequence
  misc_feature 1..14: note = Note: the sequence may be DNA or RNA
  source 1..14: mol_type = other RNA
ggcacacgggcagg

SEQ ID NO: 1926 - RNA, 14 nt, synthetic construct
  variation 1..14: note = Description of Sequence: ASO sequence
  misc_feature 1..14: note = Note: the sequence may be DNA or RNA
  source 1..14: mol_type = other RNA
tggcacacgggcag

SEQ ID NO: 1927 - RNA, 14 nt, synthetic construct
  variation 1..14: note = Description of Sequence: ASO sequence
  misc_feature 1..14: note = Note: the sequence may be DNA or RNA
  source 1..14: mol_type = other RNA
gtggcacacgggca

SEQ ID NO: 1928 - RNA, 14 nt, synthetic construct
  variation 1..14: note = Description of Sequence: ASO sequence
  misc_feature 1..14: note = Note: the sequence may be DNA or RNA
  source 1..14: mol_type = other RNA
ggtggcacacgggc

SEQ ID NO: 1929 - RNA, 14 nt, synthetic construct
  variation 1..14: note = Description of Sequence: ASO sequence
  misc_feature 1..14: note = Note: the sequence may be DNA or RNA
  source 1..14: mol_type = other RNA
aggtggcacacggg

SEQ ID NO: 1930 - RNA, 14 nt, synthetic construct
  variation 1..14: note = Description of Sequence: ASO sequence
  misc_feature 1..14: note = Note: the sequence may be DNA or RNA
  source 1..14: mol_type = other RNA
aaggtggcacacgg

SEQ ID NO: 1931 - RNA, 14 nt, synthetic construct
  variation 1..14: note = Description of Sequence: ASO sequence
  misc_feature 1..14: note = Note: the sequence may be DNA or RNA
  source 1..14: mol_type = other RNA
aaaggtggcacacg

SEQ ID NO: 1932 - RNA, 14 nt, synthetic construct
  variation 1..14: note = Description of Sequence: ASO sequence
  misc_feature 1..14: note = Note: the sequence may be DNA or RNA
  source 1..14: mol_type = other RNA
caaaggtggcacac

SEQ ID NO: 1933 - RNA, 14 nt, synthetic construct
  variation 1..14: note = Description of Sequence: ASO sequence
  misc_feature 1..14: note = Note: the sequence may be DNA or RNA
  source 1..14: mol_type = other RNA
acaaaggtggcaca

SEQ ID NO: 1934 - RNA, 14 nt, synthetic construct
  variation 1..14: note = Description of Sequence: ASO sequence
  misc_feature 1..14: note = Note: the sequence may be DNA or RNA
  source 1..14: mol_type = other RNA
cacaaaggtggcac

SEQ ID NO: 1935 - RNA, 14 nt, synthetic construct
  variation 1..14: note = Description of Sequence: ASO sequence
  misc_feature 1..14: note = Note: the sequence may be DNA or RNA
  source 1..14: mol_type = other RNA
ccacaaaggtggca

SEQ ID NO: 1936 - RNA, 14 nt, synthetic construct
  variation 1..14: note = Description of Sequence: ASO sequence
  misc_feature 1..14: note = Note: the sequence may be DNA or RNA
  source 1..14: mol_type = other RNA
tccacaaaggtggc

SEQ ID NO: 1937 - RNA, 14 nt, synthetic construct
  variation 1..14: note = Description of Sequence: ASO sequence
  misc_feature 1..14: note = Note: the sequence may be DNA or RNA
  source 1..14: mol_type = other RNA
ttccacaaaggtgg

SEQ ID NO: 1938 - RNA, 14 nt, synthetic construct
  variation 1..14: note = Description of Sequence: ASO sequence
  misc_feature 1..14: note = Note: the sequence may be DNA or RNA
  source 1..14: mol_type = other RNA
attccacaaaggtg

SEQ ID NO: 1939 - RNA, 14 nt, synthetic construct
  variation 1..14: note = Description of Sequence: ASO sequence
  misc_feature 1..14: note = Note: the sequence may be DNA or RNA
  source 1..14: mol_type = other RNA
tattccacaaaggt

SEQ ID NO: 1940 - RNA, 14 nt, synthetic construct
  variation 1..14: note = Description of Sequence: ASO sequence
  misc_feature 1..14: note = Note: the sequence may be DNA or RNA
  source 1..14: mol_type = other RNA
gtattccacaaagg

SEQ ID NO: 1941 - RNA, 14 nt, synthetic construct
  variation 1..14: note = Description of Sequence: ASO sequence
  misc_feature 1..14: note = Note: the sequence may be DNA or RNA
  source 1..14: mol_type = other RNA
agtattccacaaag

SEQ ID NO: 1942 - RNA, 14 nt, synthetic construct
  variation 1..14: note = Description of Sequence: ASO sequence
  misc_feature 1..14: note = Note: the sequence may be DNA or RNA
  source 1..14: mol_type = other RNA
gagtattccacaaa

SEQ ID NO: 1943 - RNA, 14 nt, synthetic construct
  variation 1..14: note = Description of Sequence: ASO sequence
  misc_feature 1..14: note = Note: the sequence may be DNA or RNA
  source 1..14: mol_type = other RNA
tgagtattccacaa

SEQ ID NO: 1944 - RNA, 14 nt, synthetic construct
  variation 1..14: note = Description of Sequence: ASO sequence
  misc_feature 1..14: note = Note: the sequence may be DNA or RNA
  source 1..14: mol_type = other RNA
gtgagtattccaca

SEQ ID NO: 1945 - RNA, 14 nt, synthetic construct
  variation 1..14: note = Description of Sequence: ASO sequence
  misc_feature 1..14: note = Note: the sequence may be DNA or RNA
  source 1..14: mol_type = other RNA
cgtgagtattccac

SEQ ID NO: 1946 - RNA, 14 nt, synthetic construct
  variation 1..14: note = Description of Sequence: ASO sequence
  misc_feature 1..14: note = Note: the sequence may be DNA or RNA
  source 1..14: mol_type = other RNA
gcgtgagtattcca

SEQ ID NO: 1947 - RNA, 14 nt, synthetic construct
  variation 1..14: note = Description of Sequence: ASO sequence
  misc_feature 1..14: note = Note: the sequence may be DNA or RNA
  source 1..14: mol_type = other RNA
ggcgtgagtattcc

SEQ ID NO: 1948 - RNA, 14 nt, synthetic construct
  variation 1..14: note = Description of Sequence: ASO sequence
  misc_feature 1..14: note = Note: the sequence may be DNA or RNA
  source 1..14: mol_type = other RNA
tggcgtgagtattc

SEQ ID NO: 1949 - RNA, 14 nt, synthetic construct
  variation 1..14: note = Description of Sequence: ASO sequence
  misc_feature 1..14: note = Note: the sequence may be DNA or RNA
  source 1..14: mol_type = other RNA
ctggcgtgagtatt

SEQ ID NO: 1950 - RNA, 14 nt, synthetic construct
  variation 1..14: note = Description of Sequence: ASO sequence
  misc_feature 1..14: note = Note: the sequence may be DNA or RNA
  source 1..14: mol_type = other RNA
actggcgtgagtat

SEQ ID NO: 1951 - RNA, 14 nt, synthetic construct
  variation 1..14: note = Description of Sequence: ASO sequence
  misc_feature 1..14: note = Note: the sequence may be DNA or RNA
  source 1..14: mol_type = other RNA
cactggcgtgagta

SEQ ID NO: 1952 - RNA, 14 nt, synthetic construct
  variation 1..14: note = Description of Sequence: ASO sequence
  misc_feature 1..14: note = Note: the sequence may be DNA or RNA
  source 1..14: mol_type = other RNA
gcactggcgtgagt

SEQ ID NO: 1953 - RNA, 14 nt, synthetic construct
  variation 1..14: note = Description of Sequence: ASO sequence
  misc_feature 1..14: note = Note: the sequence may be DNA or RNA
  source 1..14: mol_type = other RNA
cgcactggcgtgag

SEQ ID NO: 1954 - RNA, 14 nt, synthetic construct
  variation 1..14: note = Description of Sequence: ASO sequence
  misc_feature 1..14: note = Note: the sequence may be DNA or RNA
  source 1..14: mol_type = other RNA
gcgcactggcgtga

SEQ ID NO: 1955 - RNA, 14 nt, synthetic construct
  variation 1..14: note = Description of Sequence: ASO sequence
  misc_feature 1..14: note = Note: the sequence may be DNA or RNA
  source 1..14: mol_type = other RNA
ggcgcactggcgtg

SEQ ID NO: 1956 - RNA, 14 nt, synthetic construct
  variation 1..14: note = Description of Sequence: ASO sequence
  misc_feature 1..14: note = Note: the sequence may be DNA or RNA
  source 1..14: mol_type = other RNA
gggcgcactggcgt

SEQ ID NO: 1957 - RNA, 14 nt, synthetic construct
  variation 1..14: note = Description of Sequence: ASO sequence
  misc_feature 1..14: note = Note: the sequence may be DNA or RNA
  source 1..14: mol_type = other RNA
tgggcgcactggcg

SEQ ID NO: 1958 - RNA, 14 nt, synthetic construct
  variation 1..14: note = Description of Sequence: ASO sequence
  misc_feature 1..14: note = Note: the sequence may be DNA or RNA
  source 1..14: mol_type = other RNA
gtgggcgcactggc

SEQ ID NO: 1959 - RNA, 14 nt, synthetic construct
  variation 1..14: note = Description of Sequence: ASO sequence
  misc_feature 1..14: note = Note: the sequence may be DNA or RNA
  source 1..14: mol_type = other RNA
cgtgggcgcactgg

SEQ ID NO: 1960 - RNA, 14 nt, synthetic construct
  variation 1..14: note = Description of Sequence: ASO sequence
  misc_feature 1..14: note = Note: the sequence may be DNA or RNA
  source 1..14: mol_type = other RNA
gcgtgggcgcactg

SEQ ID NO: 1961 - RNA, 14 nt, synthetic construct
  variation 1..14: note = Description of Sequence: ASO sequence
  misc_feature 1..14: note = Note: the sequence may be DNA or RNA
  source 1..14: mol_type = other RNA
cgcgtgggcgcact

SEQ ID NO: 1962 - RNA, 14 nt, synthetic construct
  variation 1..14: note = Description of Sequence: ASO sequence
  misc_feature 1..14: note = Note: the sequence may be DNA or RNA
  source 1..14: mol_type = other RNA
ccgcgtgggcgcac

SEQ ID NO: 1963 - RNA, 14 nt, synthetic construct
  variation 1..14: note = Description of Sequence: ASO sequence
  misc_feature 1..14: note = Note: the sequence may be DNA or RNA
  source 1..14: mol_type = other RNA
cccgcgtgggcgca

SEQ ID NO: 1964 - RNA, 14 nt, synthetic construct
  variation 1..14: note = Description of Sequence: ASO sequence
  misc_feature 1..14: note = Note: the sequence may be DNA or RNA
  source 1..14: mol_type = other RNA
ccccgcgtgggcgc

SEQ ID NO: 1965 - RNA, 14 nt, synthetic construct
  variation 1..14: note = Description of Sequence: ASO sequence
  misc_feature 1..14: note = Note: the sequence may be DNA or RNA
  source 1..14: mol_type = other RNA
cccccgcgtgggcg

SEQ ID NO: 1966 - RNA, 14 nt, synthetic construct
  variation 1..14: note = Description of Sequence: ASO sequence
  misc_feature 1..14: note = Note: the sequence may be DNA or RNA
  source 1..14: mol_type = other RNA
ccccccgcgtgggc

SEQ ID NO: 1967 - RNA, 14 nt, synthetic construct
  variation 1..14: note = Description of Sequence: ASO sequence
  misc_feature 1..14: note = Note: the sequence may be DNA or RNA
  source 1..14: mol_type = other RNA
gccccccgcgtggg

SEQ ID NO: 1968 - RNA, 14 nt, synthetic construct
  variation 1..14: note = Description of Sequence: ASO sequence
  misc_feature 1..14: note = Note: the sequence may be DNA or RNA
  source 1..14: mol_type = other RNA
ggccccccgcgtgg

SEQ ID NO: 1969 - RNA, 14 nt, synthetic construct
  variation 1..14: note = Description of Sequence: ASO sequence
  misc_feature 1..14: note = Note: the sequence may be DNA or RNA
  source 1..14: mol_type = other RNA
tggccccccgcgtg

SEQ ID NO: 1970 - RNA, 14 nt, synthetic construct
  variation 1..14: note = Description of Sequence: ASO sequence
  misc_feature 1..14: note = Note: the sequence may be DNA or RNA
  source 1..14: mol_type = other RNA
ctggccccccgcgt

SEQ ID NO: 1971 - RNA, 14 nt, synthetic construct
  variation 1..14: note = Description of Sequence: ASO sequence
  misc_feature 1..14: note = Note: the sequence may be DNA or RNA
  source 1..14: mol_type = other RNA
gctggccccccgcg

SEQ ID NO: 1972 - RNA, 14 nt, synthetic construct
  variation 1..14: note = Description of Sequence: ASO sequence
  misc_feature 1..14: note = Note: the sequence may be DNA or RNA
  source 1..14: mol_type = other RNA
ggctggccccccgc

SEQ ID NO: 1973 - RNA, 14 nt, synthetic construct
  variation 1..14: note = Description of Sequence: ASO sequence
  misc_feature 1..14: note = Note: the sequence may be DNA or RNA
  source 1..14: mol_type = other RNA
cggctggccccccg

SEQ ID NO: 1974 - RNA, 14 nt, synthetic construct
  variation 1..14: note = Description of Sequence: ASO sequence
  misc_feature 1..14: note = Note: the sequence may be DNA or RNA
  source 1..14: mol_type = other RNA
gcggctggcccccc

SEQ ID NO: 1975 - RNA, 14 nt, synthetic construct
  variation 1..14: note = Description of Sequence: ASO sequence
  misc_feature 1..14: note = Note: the sequence may be DNA or RNA
  source 1..14: mol_type = other RNA
cgcggctggccccc

SEQ ID NO: 1976 - RNA, 14 nt, synthetic construct
  variation 1..14: note = Description of Sequence: ASO sequence
  misc_feature 1..14: note = Note: the sequence may be DNA or RNA
  source 1..14: mol_type = other RNA
ccgcggctggcccc

SEQ ID NO: 1977 - RNA, 14 nt, synthetic construct
  variation 1..14: note = Description of Sequence: ASO sequence
  misc_feature 1..14: note = Note: the sequence may be DNA or RNA
  source 1..14: mol_type = other RNA
tccgcggctggccc

SEQ ID NO: 1978 - RNA, 14 nt, synthetic construct
  variation 1..14: note = Description of Sequence: ASO sequence
  misc_feature 1..14: note = Note: the sequence may be DNA or RNA
  source 1..14: mol_type = other RNA
ttccgcggctggcc

SEQ ID NO: 1979 - RNA, 14 nt, synthetic construct
  variation 1..14: note = Description of Sequence: ASO sequence
  misc_feature 1..14: note = Note: the sequence may be DNA or RNA
  source 1..14: mol_type = other RNA
gttccgcggctggc

SEQ ID NO: 1980 - RNA, 14 nt, synthetic construct
  variation 1..14: note = Description of Sequence: ASO sequence
  misc_feature 1..14: note = Note: the sequence may be DNA or RNA
  source 1..14: mol_type = other RNA
agttccgcggctgg

SEQ ID NO: 1981 - RNA, 14 nt, synthetic construct
  variation 1..14: note = Description of Sequence: ASO sequence
  misc_feature 1..14: note = Note: the sequence may be DNA or RNA
  source 1..14: mol_type = other RNA
cagttccgcggctg

SEQ ID NO: 1982 - RNA, 14 nt, synthetic construct
  variation 1..14: note = Description of Sequence: ASO sequence
  misc_feature 1..14: note = Note: the sequence may be DNA or RNA
  source 1..14: mol_type = other RNA
ccagttccgcggct

SEQ ID NO: 1983 - RNA, 14 nt, synthetic construct
  variation 1..14: note = Description of Sequence: ASO sequence
  misc_feature 1..14: note = Note: the sequence may be DNA or RNA
  source 1..14: mol_type = other RNA
tccagttccgcggc

SEQ ID NO: 1984 - RNA, 14 nt, synthetic construct
  variation 1..14: note = Description of Sequence: ASO sequence
  misc_feature 1..14: note = Note: the sequence may be DNA or RNA
  source 1..14: mol_type = other RNA
ctccagttccgcgg

SEQ ID NO: 1985 - RNA, 14 nt, synthetic construct
  variation 1..14: note = Description of Sequence: ASO sequence
  misc_feature 1..14: note = Note: the sequence may be DNA or RNA
  source 1..14: mol_type = other RNA
cctccagttccgcg

SEQ ID NO: 1986 - RNA, 14 nt, synthetic construct
  variation 1..14: note = Description of Sequence: ASO sequence
  misc_feature 1..14: note = Note: the sequence may be DNA or RNA
  source 1..14: mol_type = other RNA
acctccagttccgc

SEQ ID NO: 1987 - RNA, 14 nt, synthetic construct
  variation 1..14: note = Description of Sequence: ASO sequence
  misc_feature 1..14: note = Note: the sequence may be DNA or RNA
  source 1..14: mol_type = other RNA
cacctccagttccg

SEQ ID NO: 1988 - RNA, 14 nt, synthetic construct
  variation 1..14: note = Description of Sequence: ASO sequence
  misc_feature 1..14: note = Note: the sequence may be DNA or RNA
  source 1..14: mol_type = other RNA
gcacctccagttcc

SEQ ID NO: 1989 - RNA, 14 nt, synthetic construct
  variation 1..14: note = Description of Sequence: ASO sequence
  misc_feature 1..14: note = Note: the sequence may be DNA or RNA
  source 1..14: mol_type = other RNA
ggcacctccagttc

SEQ ID NO: 1990 - RNA, 14 nt, synthetic construct
  variation 1..14: note = Description of Sequence: ASO sequence
  misc_feature 1..14: note = Note: the sequence may be DNA or RNA
  source 1..14: mol_type = other RNA
gggcacctccagtt

SEQ ID NO: 1991 - RNA, 14 nt, synthetic construct
  variation 1..14: note = Description of Sequence: ASO sequence
  misc_feature 1..14: note = Note: the sequence may be DNA or RNA
  source 1..14: mol_type = other RNA
agggcacctccagt

SEQ ID NO: 1992 - RNA, 14 nt, synthetic construct
  variation 1..14: note = Description of Sequence: ASO sequence
  misc_feature 1..14: note = Note: the sequence may be DNA or RNA
  source 1..14: mol_type = other RNA
cagggcacctccag

SEQ ID NO: 1993 - RNA, 14 nt, synthetic construct
  variation 1..14: note = Description of Sequence: ASO sequence
  misc_feature 1..14: note = Note: the sequence may be DNA or RNA
  source 1..14: mol_type = other RNA
tcagggcacctcca

SEQ ID NO: 1994 - RNA, 14 nt, synthetic construct
  variation 1..14: note = Description of Sequence: ASO sequence
  misc_feature 1..14: note = Note: the sequence may be DNA or RNA
  source 1..14: mol_type = other RNA
ctcagggcacctcc

SEQ ID NO: 1995 - RNA, 14 nt, synthetic construct
  variation 1..14: note = Description of Sequence: ASO sequence
  misc_feature 1..14: note = Note: the sequence may be DNA or RNA
  source 1..14: mol_type = other RNA
gctcagggcacctc

SEQ ID NO: 1996 - RNA, 14 nt, synthetic construct
  variation 1..14: note = Description of Sequence: ASO sequence
  misc_feature 1..14: note = Note: the sequence may be DNA or RNA
  source 1..14: mol_type = other RNA
agctcagggcacct

SEQ ID NO: 1997 - RNA, 14 nt, synthetic construct
  variation 1..14: note = Description of Sequence: ASO sequence
  misc_feature 1..14: note = Note: the sequence may be DNA or RNA
  source 1..14: mol_type = other RNA
gagctcagggcacc

SEQ ID NO: 1998 - RNA, 14 nt, synthetic construct
  variation 1..14: note = Description of Sequence: ASO sequence
  misc_feature 1..14: note = Note: the sequence may be DNA or RNA
  source 1..14: mol_type = other RNA
agagctcagggcac

SEQ ID NO: 1999 - RNA, 14 nt, synthetic construct
  variation 1..14: note = Description of Sequence: ASO sequence
  misc_feature 1..14: note = Note: the sequence may be DNA or RNA
  source 1..14: mol_type = other RNA
cagagctcagggca

SEQ ID NO: 2000 - RNA, 14 nt, synthetic construct
  variation 1..14: note = Description of Sequence: ASO sequence
  misc_feature 1..14: note = Note: the sequence may be DNA or RNA
  source 1..14: mol_type = other RNA
gcagagctcagggc

SEQ ID NO: 2001 - RNA, 14 nt, synthetic construct
  variation 1..14: note = Description of Sequence: ASO sequence
  misc_feature 1..14: note = Note: the sequence may be DNA or RNA
  source 1..14: mol_type = other RNA
ggcagagctcaggg

SEQ ID NO: 2002 - RNA, 14 nt, synthetic construct
  variation 1..14: note = Description of Sequence: ASO sequence
  misc_feature 1..14: note = Note: the sequence may be DNA or RNA
  source 1..14: mol_type = other RNA
atccagcaccgtgc

SEQ ID NO: 2003 - RNA, 14 nt, synthetic construct
  variation 1..14: note = Description of Sequence: ASO sequence
  misc_feature 1..14: note = Note: the sequence may be DNA or RNA
  source 1..14: mol_type = other RNA
catccagcaccgtg

SEQ ID NO: 2004 - RNA, 14 nt, synthetic construct
  variation 1..14: note = Description of Sequence: ASO sequence
  misc_feature 1..14: note = Note: the sequence may be DNA or RNA
  source 1..14: mol_type = other RNA
tcatccagcaccgt

SEQ ID NO: 2005 - RNA, 14 nt, synthetic construct
  variation 1..14: note = Description of Sequence: ASO sequence
  misc_feature 1..14: note = Note: the sequence may be DNA or RNA
  source 1..14: mol_type = other RNA
gtcatccagcaccg

SEQ ID NO: 2006 - RNA, 14 nt, synthetic construct
  variation 1..14: note = Description of Sequence: ASO sequence
  misc_feature 1..14: note = Note: the sequence may be DNA or RNA
  source 1..14: mol_type = other RNA
tgtcatccagcacc

SEQ ID NO: 2007 - RNA, 14 nt, synthetic construct
  variation 1..14: note = Description of Sequence: ASO sequence
  misc_feature 1..14: note = Note: the sequence may be DNA or RNA
  source 1..14: mol_type = other RNA
atgtcatccagcac

SEQ ID NO: 2008 - RNA, 14 nt, synthetic construct
  variation 1..14: note = Description of Sequence: ASO sequence
  misc_feature 1..14: note = Note: the sequence may be DNA or RNA
  source 1..14: mol_type = other RNA
gatgtcatccagca

SEQ ID NO: 2009 - RNA, 14 nt, synthetic construct
  variation 1..14: note = Description of Sequence: ASO sequence
  misc_feature 1..14: note = Note: the sequence may be DNA or RNA
  source 1..14: mol_type = other RNA
tgatgtcatccagc

SEQ ID NO: 2010 - RNA, 14 nt, synthetic construct
  variation 1..14: note = Description of Sequence: ASO sequence
  misc_feature 1..14: note = Note: the sequence may be DNA or RNA
  source 1..14: mol_type = other RNA
gtgatgtcatccag

SEQ ID NO: 2011 - RNA, 14 nt, synthetic construct
  variation 1..14: note = Description of Sequence: ASO sequence
  misc_feature 1..14: note = Note: the sequence may be DNA or RNA
  source 1..14: mol_type = other RNA
cgtgatgtcatcca

SEQ ID NO: 2012 - RNA, 14 nt, synthetic construct
  variation 1..14: note = Description of Sequence: ASO sequence
  misc_feature 1..14: note = Note: the sequence may be DNA or RNA
  source 1..14: mol_type = other RNA
gcgtgatgtcatcc

SEQ ID NO: 2013 - RNA, 14 nt, synthetic construct
  variation 1..14: note = Description of Sequence: ASO sequence
  misc_feature 1..14: note = Note: the sequence may be DNA or RNA
  source 1..14: mol_type = other RNA
tgcgtgatgtcatc

SEQ ID NO: 2014 - RNA, 14 nt, synthetic construct
  variation 1..14: note = Description of Sequence: ASO sequence
  misc_feature 1..14: note = Note: the sequence may be DNA or RNA
  source 1..14: mol_type = other RNA
gtgcgtgatgtcat

SEQ ID NO: 2015 - RNA, 14 nt, synthetic construct
  variation 1..14: note = Description of Sequence: ASO sequence
  misc_feature 1..14: note = Note: the sequence may be DNA or RNA
  source 1..14: mol_type = other RNA
agtgcgtgatgtca

SEQ ID NO: 2016 - RNA, 14 nt, synthetic construct
  variation 1..14: note = Description of Sequence: ASO sequence
  misc_feature 1..14: note = Note: the sequence may be DNA or RNA
  source 1..14: mol_type = other RNA
gagtgcgtgatgtc

SEQ ID NO: 2017 - RNA, 14 nt, synthetic construct
  variation 1..14: note = Description of Sequence: ASO sequence
  misc_feature 1..14: note = Note: the sequence may be DNA or RNA
  source 1..14: mol_type = other RNA
agagtgcgtgatgt

SEQ ID NO: 2018 - RNA, 14 nt, synthetic construct
  variation 1..14: note = Description of Sequence: ASO sequence
  misc_feature 1..14: note = Note: the sequence may be DNA or RNA
  source 1..14: mol_type = other RNA
cagagtgcgtgatg

SEQ ID NO: 2019 - RNA, 14 nt, synthetic construct
  variation 1..14: note = Description of Sequence: ASO sequence
  misc_feature 1..14: note = Note: the sequence may be DNA or RNA
  source 1..14: mol_type = other RNA
ccagagtgcgtgat

SEQ ID NO: 2020 - RNA, 14 nt, synthetic construct
  variation 1..14: note = Description of Sequence: ASO sequence
  misc_feature 1..14: note = Note: the sequence may be DNA or RNA
  source 1..14: mol_type = other RNA
gccagagtgcgtga

SEQ ID NO: 2021 - RNA, 14 nt, synthetic construct
  variation 1..14: note = Description of Sequence: ASO sequence
  misc_feature 1..14: note = Note: the sequence may be DNA or RNA
  source 1..14: mol_type = other RNA
agccagagtgcgtg

SEQ ID NO: 2022 - RNA, 14 nt, synthetic construct
  variation 1..14: note = Description of Sequence: ASO sequence
  misc_feature 1..14: note = Note: the sequence may be DNA or RNA
  source 1..14: mol_type = other RNA
cagccagagtgcgt

SEQ ID NO: 2023 - RNA, 14 nt, synthetic construct
  variation 1..14: note = Description of Sequence: ASO sequence
  misc_feature 1..14: note = Note: the sequence may be DNA or RNA
  source 1..14: mol_type = other RNA
gcagccagagtgcg

SEQ ID NO: 2024 - RNA, 14 nt, synthetic construct
  variation 1..14: note = Description of Sequence: ASO sequence
  misc_feature 1..14: note = Note: the sequence may be DNA or RNA
  source 1..14: mol_type = other RNA
ggcagccagagtgc

SEQ ID NO: 2025 - RNA, 14 nt, synthetic construct
  variation 1..14: note = Description of Sequence: ASO sequence
  misc_feature 1..14: note = Note: the sequence may be DNA or RNA
  source 1..14: mol_type = other RNA
aggcagccagagtg

SEQ ID NO: 2026 - RNA, 14 nt, synthetic construct
  variation 1..14: note = Description of Sequence: ASO sequence
  misc_feature 1..14: note = Note: the sequence may be DNA or RNA
  source 1..14: mol_type = other RNA
caggcagccagagt

SEQ ID NO: 2027 - RNA, 14 nt, synthetic construct
  variation 1..14: note = Description of Sequence: ASO sequence
  misc_feature 1..14: note = Note: the sequence may be DNA or RNA
  source 1..14: mol_type = other RNA
gcaggcagccagag

SEQ ID NO: 2028 - RNA, 14 nt, synthetic construct
  variation 1..14: note = Description of Sequence: ASO sequence
  misc_feature 1..14: note = Note: the sequence may be DNA or RNA
  source 1..14: mol_type = other RNA
ggcaggcagccaga

SEQ ID NO: 2029 - RNA, 14 nt, synthetic construct
  variation 1..14: note = Description of Sequence: ASO sequence
  misc_feature 1..14: note = Note: the sequence may be DNA or RNA
  source 1..14: mol_type = other RNA
gggcaggcagccag

SEQ ID NO: 2030 - RNA, 14 nt, synthetic construct
  variation 1..14: note = Description of Sequence: ASO sequence
  misc_feature 1..14: note = Note: the sequence may be DNA or RNA
  source 1..14: mol_type = other RNA
ggggcaggcagcca

SEQ ID NO: 2031 - RNA, 14 nt, synthetic construct
  variation 1..14: note = Description of Sequence: ASO sequence
  misc_feature 1..14: note = Note: the sequence may be DNA or RNA
  source 1..14: mol_type = other RNA
aggggcaggcagcc

SEQ ID NO: 2032 - RNA, 14 nt, synthetic construct
  variation 1..14: note = Description of Sequence: ASO sequence
  misc_feature 1..14: note = Note: the sequence may be DNA or RNA
  source 1..14: mol_type = other RNA
gaggggcaggcagc

SEQ ID NO: 2033 - RNA, 14 nt, synthetic construct
  variation 1..14: note = Description of Sequence: ASO sequence
  misc_feature 1..14: note = Note: the sequence may be DNA or RNA
  source 1..14: mol_type = other RNA
cgaggggcaggcag

SEQ ID NO: 2034 - RNA, 14 nt, synthetic construct
  variation 1..14: note = Description of Sequence: ASO sequence
  misc_feature 1..14: note = Note: the sequence may be DNA or RNA
  source 1..14: mol_type = other RNA
ccgaggggcaggca

SEQ ID NO: 2035 - RNA, 14 nt, synthetic construct
  variation 1..14: note = Description of Sequence: ASO sequence
  misc_feature 1..14: note = Note: the sequence may be DNA or RNA
  source 1..14: mol_type = other RNA
cccgaggggcaggc

SEQ ID NO: 2036 - RNA, 14 nt, synthetic construct
  variation 1..14: note = Description of Sequence: ASO sequence
  misc_feature 1..14: note = Note: the sequence may be DNA or RNA
  source 1..14: mol_type = other RNA
gcccgaggggcagg

SEQ ID NO: 2037 - RNA, 14 nt, synthetic construct
  variation 1..14: note = Description of Sequence: ASO sequence
  misc_feature 1..14: note = Note: the sequence may be DNA or RNA
  source 1..14: mol_type = other RNA
tgcccgaggggcag

SEQ ID NO: 2038 - RNA, 14 nt, synthetic construct
  variation 1..14: note = Description of Sequence: ASO sequence
  misc_feature 1..14: note = Note: the sequence may be DNA or RNA
  source 1..14: mol_type = other RNA
ctgcccgaggggca

SEQ ID NO: 2039 - RNA, 14 nt, synthetic construct
  variation 1..14: note = Description of Sequence: ASO sequence
  misc_feature 1..14: note = Note: the sequence may be DNA or RNA
  source 1..14: mol_type = other RNA
actgcccgaggggc

SEQ ID NO: 2040 - RNA, 14 nt, synthetic construct
  variation 1..14: note = Description of Sequence: ASO sequence
  misc_feature 1..14: note = Note: the sequence may be DNA or RNA
  source 1..14: mol_type = other RNA
cactgcccgagggg

SEQ ID NO: 2041 - RNA, 14 nt, synthetic construct
  variation 1..14: note = Description of Sequence: ASO sequence
  misc_feature 1..14: note = Note: the sequence may be DNA or RNA
  source 1..14: mol_type = other RNA
gcactgcccgaggg

SEQ ID NO: 2042 - RNA, 14 nt, synthetic construct
  variation 1..14: note = Description of Sequence: ASO sequence
  misc_feature 1..14: note = Note: the sequence may be DNA or RNA
  source 1..14: mol_type = other RNA
ggcactgcccgagg

SEQ ID NO: 2043 - RNA, 14 nt, synthetic construct
  variation 1..14: note = Description of Sequence: ASO sequence
  misc_feature 1..14: note = Note: the sequence may be DNA or RNA
  source 1..14: mol_type = other RNA
gggcactgcccgag

SEQ ID NO: 2044 - RNA, 14 nt, synthetic construct
  variation 1..14: note = Description of Sequence: ASO sequence
  misc_feature 1..14: note = Note: the sequence may be DNA or RNA
  source 1..14: mol_type = other RNA
ggggcactgcccga

SEQ ID NO: 2045 - RNA, 14 nt, synthetic construct
  variation 1..14: note = Description of Sequence: ASO sequence
  misc_feature 1..14: note = Note: the sequence may be DNA or RNA
  source 1..14: mol_type = other RNA
aggggcactgcccg

SEQ ID NO: 2046 - RNA, 14 nt, synthetic construct
  variation 1..14: note = Description of Sequence: ASO sequence
  misc_feature 1..14: note = Note: the sequence may be DNA or RNA
  source 1..14: mol_type = other RNA
caggggcactgccc

SEQ ID NO: 2047 - RNA, 14 nt, synthetic construct
  variation 1..14: note = Description of Sequence: ASO sequence
  misc_feature 1..14: note = Note: the sequence may be DNA or RNA
  source 1..14: mol_type = other RNA
gcaggggcactgcc

SEQ ID NO: 2048 - RNA, 14 nt, synthetic construct
  variation 1..14: note = Description of Sequence: ASO sequence
  misc_feature 1..14: note = Note: the sequence may be DNA or RNA
  source 1..14: mol_type = other RNA
tgcaggggcactgc

SEQ ID NO: 2049 - RNA, 14 nt, synthetic construct
  variation 1..14: note = Description of Sequence: ASO sequence
  misc_feature 1..14: note = Note: the sequence may be DNA or RNA
  source 1..14: mol_type = other RNA
gtgcaggggcactg

SEQ ID NO: 2050 - RNA, 14 nt, synthetic construct
  variation 1..14: note = Description of Sequence: ASO sequence
  misc_feature 1..14: note = Note: the sequence may be DNA or RNA
  source 1..14: mol_type = other RNA
ggtgcaggggcact

SEQ ID NO: 2051 - RNA, 14 nt, synthetic construct
  variation 1..14: note = Description of Sequence: ASO sequence
  misc_feature 1..14: note = Note: the sequence may be DNA or RNA
  source 1..14: mol_type = other RNA
gggtgcaggggcac

SEQ ID NO: 2052 - RNA, 14 nt, synthetic construct
  variation 1..14: note = Description of Sequence: ASO sequence
  misc_feature 1..14: note = Note: the sequence may be DNA or RNA
  source 1..14: mol_type = other RNA
tgggtgcaggggca

SEQ ID NO: 2053 - RNA, 14 nt, synthetic construct
  variation 1..14: note = Description of Sequence: ASO sequence
  misc_feature 1..14: note = Note: the sequence may be DNA or RNA
  source 1..14: mol_type = other RNA
gtgggtgcaggggc

SEQ ID NO: 2054 - RNA, 14 nt, synthetic construct
  variation 1..14: note = Description of Sequence: ASO sequence
  misc_feature 1..14: note = Note: the sequence may be DNA or RNA
  source 1..14: mol_type = other RNA
cgtgggtgcagggg

SEQ ID NO: 2055 - RNA, 14 nt, synthetic construct
  variation 1..14: note = Description of Sequence: ASO sequence
  misc_feature 1..14: note = Note: the sequence may be DNA or RNA
  source 1..14: mol_type = other RNA
ccgtgggtgcaggg

SEQ ID NO: 2056 - RNA, 14 nt, synthetic construct
  variation 1..14: note = Description of Sequence: ASO sequence
  misc_feature 1..14: note = Note: the sequence may be DNA or RNA
  source 1..14: mol_type = other RNA
gccgtgggtgcagg

SEQ ID NO: 2057 - RNA, 14 nt, synthetic construct
  variation 1..14: note = Description of Sequence: ASO sequence
  misc_feature 1..14: note = Note: the sequence may be DNA or RNA
  source 1..14: mol_type = other RNA
cgccgtgggtgcag

SEQ ID NO: 2058 - RNA, 14 nt, synthetic construct
  variation 1..14: note = Description of Sequence: ASO sequence
  misc_feature 1..14: note = Note: the sequence may be DNA or RNA
  source 1..14: mol_type = other RNA
ccgccgtgggtgca

SEQ ID NO: 2059 - RNA, 14 nt, synthetic construct
  variation 1..14: note = Description of Sequence: ASO sequence
  misc_feature 1..14: note = Note: the sequence may be DNA or RNA
  source 1..14: mol_type = other RNA
gccgccgtgggtgc

SEQ ID NO: 2060 - RNA, 14 nt, synthetic construct
  variation 1..14: note = Description of Sequence: ASO sequence
  misc_feature 1..14: note = Note: the sequence may be DNA or RNA
  source 1..14: mol_type = other RNA
ggccgccgtgggtg

SEQ ID NO: 2061 - RNA, 14 nt, synthetic construct
  variation 1..14: note = Description of Sequence: ASO sequence
  misc_feature 1..14: note = Note: the sequence may be DNA or RNA
  source 1..14: mol_type = other RNA
cggccgccgtgggt

SEQ ID NO: 2062 - RNA, 14 nt, synthetic construct
  variation 1..14: note = Description of Sequence: ASO sequence
  misc_feature 1..14: note = Note: the sequence may be DNA or RNA
  source 1..14: mol_type = other RNA
gcggccgccgtggg

SEQ ID NO: 2063 - RNA, 14 nt, synthetic construct
  variation 1..14: note = Description of Sequence: ASO sequence
  misc_feature 1..14: note = Note: the sequence may be DNA or RNA
  source 1..14: mol_type = other RNA
tgcggccgccgtgg

SEQ ID NO: 2064 - RNA, 14 nt, synthetic construct
  variation 1..14: note = Description of Sequence: ASO sequence
  misc_feature 1..14: note = Note: the sequence may be DNA or RNA
  source 1..14: mol_type = other RNA
gtgcggccgccgtg

SEQ ID NO: 2065 - RNA, 14 nt, synthetic construct
  variation 1..14: note = Description of Sequence: ASO sequence
  misc_feature 1..14: note = Note: the sequence may be DNA or RNA
  source 1..14: mol_type = other RNA
ggtgcggccgccgt

SEQ ID NO: 2066 - RNA, 14 nt, synthetic construct
  variation 1..14: note = Description of Sequence: ASO sequence
  misc_feature 1..14: note = Note: the sequence may be DNA or RNA
  source 1..14: mol_type = other RNA
aggtgcggccgccg

SEQ ID NO: 2067 - RNA, 14 nt, synthetic construct
  variation 1..14: note = Description of Sequence: ASO sequence
  misc_feature 1..14: note = Note: the sequence may be DNA or RNA
  source 1..14: mol_type = other RNA
taggtgcggccgcc

SEQ ID NO: 2068 - RNA, 14 nt, synthetic construct
  variation 1..14: note = Description of Sequence: ASO sequence
  misc_feature 1..14: note = Note: the sequence may be DNA or RNA
  source 1..14: mol_type = other RNA
gtaggtgcggccgc

SEQ ID NO: 2069 - RNA, 14 nt, synthetic construct
  variation 1..14: note = Description of Sequence: ASO sequence
  misc_feature 1..14: note = Note: the sequence may be DNA or RNA
  source 1..14: mol_type = other RNA
tgtaggtgcggccg

SEQ ID NO: 2070 - RNA, 14 nt, synthetic construct
  variation 1..14: note = Description of Sequence: ASO sequence
  misc_feature 1..14: note = Note: the sequence may be DNA or RNA
  source 1..14: mol_type = other RNA
ctgtaggtgcggcc

SEQ ID NO: 2071 - RNA, 14 nt, synthetic construct
  variation 1..14: note = Description of Sequence: ASO sequence
  misc_feature 1..14: note = Note: the sequence may be DNA or RNA
  source 1..14: mol_type = other RNA
gctgtaggtgcggc

SEQ ID NO: 2072 - RNA, 14 nt, synthetic construct
  variation 1..14: note = Description of Sequence: ASO sequence
  misc_feature 1..14: note = Note: the sequence may be DNA or RNA
  source 1..14: mol_type = other RNA
ggctgtaggtgcgg

SEQ ID NO: 2073 - RNA, 14 nt, synthetic construct
  variation 1..14: note = Description of Sequence: ASO sequence
  misc_feature 1..14: note = Note: the sequence may be DNA or RNA
  source 1..14: mol_type = other RNA
gggctgtaggtgcg

SEQ ID NO: 2074 - RNA, 14 nt, synthetic construct
  variation 1..14: note = Description of Sequence: ASO sequence
  misc_feature 1..14: note = Note: the sequence may be DNA or RNA
  source 1..14: mol_type = other RNA
cgggctgtaggtgc

SEQ ID NO: 2075 - RNA, 14 nt, synthetic construct
  variation 1..14: note = Description of Sequence: ASO sequence
  misc_feature 1..14: note = Note: the sequence may be DNA or RNA
  source 1..14: mol_type = other RNA
ccgggctgtaggtg

SEQ ID NO: 2076 - RNA, 14 nt, synthetic construct
  variation 1..14: note = Description of Sequence: ASO sequence
  misc_feature 1..14: note = Note: the sequence may be DNA or RNA
  source 1..14: mol_type = other RNA
cccgggctgtaggt

SEQ ID NO: 2077 - RNA, 14 nt, synthetic construct
  variation 1..14: note = Description of Sequence: ASO sequence
  misc_feature 1..14: note = Note: the sequence may be DNA or RNA
  source 1..14: mol_type = other RNA
gcccgggctgtagg

SEQ ID NO: 2078 - RNA, 14 nt, synthetic construct
  variation 1..14: note = Description of Sequence: ASO sequence
  misc_feature 1..14: note = Note: the sequence may be DNA or RNA
  source 1..14: mol_type = other RNA
tgcccgggctgtag

SEQ ID NO: 2079 - RNA, 14 nt, synthetic construct
  variation 1..14: note = Description of Sequence: ASO sequence
  misc_feature 1..14: note = Note: the sequence may be DNA or RNA
  source 1..14: mol_type = other RNA
gtgcccgggctgta

SEQ ID NO: 2080 - RNA, 14 nt, synthetic construct
  variation 1..14: note = Description of Sequence: ASO sequence
  misc_feature 1..14: note = Note: the sequence may be DNA or RNA
  source 1..14: mol_type = other RNA
ggtgcccgggctgt

SEQ ID NO: 2081 - RNA, 14 nt, synthetic construct
  variation 1..14: note = Description of Sequence: ASO sequence
  misc_feature 1..14: note = Note: the sequence may be DNA or RNA
  source 1..14: mol_type = other RNA
aggtgcccgggctg

SEQ ID NO: 2082 - RNA, 14 nt, synthetic construct
  variation 1..14: note = Description of Sequence: ASO sequence
  misc_feature 1..14: note = Note: the sequence may be DNA or RNA
  source 1..14: mol_type = other RNA
gaggtgcccgggct

SEQ ID NO: 2083 - RNA, 14 nt, synthetic construct
  variation 1..14: note = Description of Sequence: ASO sequence
  misc_feature 1..14: note = Note: the sequence may be DNA or RNA
  source 1..14: mol_type = other RNA
ggaggtgcccgggc

SEQ ID NO: 2084 - RNA, 14 nt, synthetic construct
  variation 1..14: note = Description of Sequence: ASO sequence
  misc_feature 1..14: note = Note: the sequence may be DNA or RNA
  source 1..14: mol_type = other RNA
aggaggtgcccggg

SEQ ID NO: 2085 - RNA, 14 nt, synthetic construct
  variation 1..14: note = Description of Sequence: ASO sequence
  misc_feature 1..14: note = Note: the sequence may be DNA or RNA
  source 1..14: mol_type = other RNA
aaggaggtgcccgg

SEQ ID NO: 2086 - RNA, 14 nt, synthetic construct
  variation 1..14: note = Description of Sequence: ASO sequence
  misc_feature 1..14: note = Note: the sequence may be DNA or RNA
  source 1..14: mol_type = other RNA
gaaggaggtgcccg

SEQ ID NO: 2087 - RNA, 14 nt, synthetic construct
  variation 1..14: note = Description of Sequence: ASO sequence
  misc_feature 1..14: note = Note: the sequence may be DNA or RNA
  source 1..14: mol_type = other RNA
tgaaggaggtgccc

SEQ ID NO: 2088 - RNA, 14 nt, synthetic construct
  variation 1..14: note = Description of Sequence: ASO sequence
  misc_feature 1..14: note = Note: the sequence may be DNA or RNA
  source 1..14: mol_type = other RNA
ttgaaggaggtgcc

SEQ ID NO: 2089 - RNA, 14 nt, synthetic construct
  variation 1..14: note = Description of Sequence: ASO sequence
  misc_feature 1..14: note = Note: the sequence may be DNA or RNA
  source 1..14: mol_type = other RNA
gttgaaggaggtgc

SEQ ID NO: 2090 - RNA, 14 nt, synthetic construct
  variation 1..14: note = Description of Sequence: ASO sequence
  misc_feature 1..14: note = Note: the sequence may be DNA or RNA
  source 1..14: mol_type = other RNA
tgttgaaggaggtg

SEQ ID NO: 2091 - RNA, 14 nt, synthetic construct
  variation 1..14: note = Description of Sequence: ASO sequence
  misc_feature 1..14: note = Note: the sequence may be DNA or RNA
  source 1..14: mol_type = other RNA
gtgttgaaggaggt

SEQ ID NO: 2092 - RNA, 14 nt, synthetic construct
  variation 1..14: note = Description of Sequence: ASO sequence
  misc_feature 1..14: note = Note: the sequence may be DNA or RNA
  source 1..14: mol_type = other RNA
ggtgttgaaggagg

SEQ ID NO: 2093 - RNA, 14 nt, synthetic construct
  variation 1..14: note = Description of Sequence: ASO sequence
  misc_feature 1..14: note = Note: the sequence may be DNA or RNA
  source 1..14: mol_type = other RNA
tggtgttgaaggag

SEQ ID NO: 2094 - RNA, 14 nt, synthetic construct
  variation 1..14: note = Description of Sequence: ASO sequence
  misc_feature 1..14: note = Note: the sequence may be DNA or RNA
  source 1..14: mol_type = other RNA
gtggtgttgaagga

SEQ ID NO: 2095 - RNA, 14 nt, synthetic construct
  variation 1..14: note = Description of Sequence: ASO sequence
  misc_feature 1..14: note = Note: the sequence may be DNA or RNA
  source 1..14: mol_type = other RNA
ggtggtgttgaagg

SEQ ID NO: 2096 - RNA, 14 nt, synthetic construct
  variation 1..14: note = Description of Sequence: ASO sequence
  misc_feature 1..14: note = Note: the sequence may be DNA or RNA
  source 1..14: mol_type = other RNA
aggtggtgttgaag

SEQ ID NO: 2097 - RNA, 14 nt, synthetic construct
  variation 1..14: note = Description of Sequence: ASO sequence
  misc_feature 1..14: note = Note: the sequence may be DNA or RNA
  source 1..14: mol_type = other RNA
caggtggtgttgaa

SEQ ID NO: 2098 - RNA, 14 nt, synthetic construct
  variation 1..14: note = Description of Sequence: ASO sequence
  misc_feature 1..14: note = Note: the sequence may be DNA or RNA
  source 1..14: mol_type = other RNA
gcaggtggtgttga

SEQ ID NO: 2099 - RNA, 14 nt, synthetic construct
  variation 1..14: note = Description of Sequence: ASO sequence
  misc_feature 1..14: note = Note: the sequence may be DNA or RNA
  source 1..14: mol_type = other RNA
tgcaggtggtgttg

SEQ ID NO: 2100 - RNA, 14 nt, synthetic construct
  variation 1..14: note = Description of Sequence: ASO sequence
  misc_feature 1..14: note = Note: the sequence may be DNA or RNA
  source 1..14: mol_type = other RNA
ctgcaggtggtgtt

SEQ ID NO: 2101 - RNA, 14 nt, synthetic construct
  variation 1..14: note = Description of Sequence: ASO sequence
  misc_feature 1..14: note = Note: the sequence may be DNA or RNA
  source 1..14: mol_type = other RNA
gctgcaggtggtgt

SEQ ID NO: 2102 - RNA, 14 nt, synthetic construct
  variation 1..14: note = Description of Sequence: ASO sequence
  misc_feature 1..14: note = Note: the sequence may be DNA or RNA
  source 1..14: mol_type = other RNA
agctgcaggtggtg

SEQ ID NO: 2103 - RNA, 14 nt, synthetic construct
  variation 1..14: note = Description of Sequence: ASO sequence
  misc_feature 1..14: note = Note: the sequence may be DNA or RNA
  source 1..14: mol_type = other RNA
gagctgcaggtggt

SEQ ID NO: 2104 - RNA, 14 nt, synthetic construct
  variation 1..14: note = Description of Sequence: ASO sequence
  misc_feature 1..14: note = Note: the sequence may be DNA or RNA
  source 1..14: mol_type = other RNA
ggagctgcaggtgg

SEQ ID NO: 2105 - RNA, 14 nt, synthetic construct
  variation 1..14: note = Description of Sequence: ASO sequence
  misc_feature 1..14: note = Note: the sequence may be DNA or RNA
  source 1..14: mol_type = other RNA
aggagctgcaggtg

SEQ ID NO: 2106 - RNA, 14 nt, synthetic construct
  variation 1..14: note = Description of Sequence: ASO sequence
  misc_feature 1..14: note = Note: the sequence may be DNA or RNA
  source 1..14: mol_type = other RNA
caggagctgcaggt

SEQ ID NO: 2107 - RNA, 14 nt, synthetic construct
  variation 1..14: note = Description of Sequence: ASO sequence
  misc_feature 1..14: note = Note: the sequence may be DNA or RNA
  source 1..14: mol_type = other RNA
ccccggagcaggtg

SEQ ID NO: 2108 - RNA, 14 nt, synthetic construct
  variation 1..14: note = Description of Sequence: ASO sequence
  misc_feature 1..14: note = Note: the sequence may be DNA or RNA
  source 1..14: mol_type = other RNA
cccccggagcaggt

SEQ ID NO: 2109 - RNA, 14 nt, synthetic construct
  variation 1..14: note = Description of Sequence: ASO sequence
  misc_feature 1..14: note = Note: the sequence may be DNA or RNA
  source 1..14: mol_type = other RNA
ccccccggagcagg

SEQ ID NO: 2110 - RNA, 14 nt, synthetic construct
  variation 1..14: note = Description of Sequence: ASO sequence
  misc_feature 1..14: note = Note: the sequence may be DNA or RNA
  source 1..14: mol_type = other RNA
gccccccggagcag

SEQ ID NO: 2111 - RNA, 14 nt, synthetic construct
  variation 1..14: note = Description of Sequence: ASO sequence
  misc_feature 1..14: note = Note: the sequence may be DNA or RNA
  source 1..14: mol_type = other RNA
agccccccggagca

SEQ ID NO: 2112 - RNA, 14 nt, synthetic construct
  variation 1..14: note = Description of Sequence: ASO sequence
  misc_feature 1..14: note = Note: the sequence may be DNA or RNA
  source 1..14: mol_type = other RNA
tagccccccggagc

SEQ ID NO: 2113 - RNA, 14 nt, synthetic construct
  variation 1..14: note = Description of Sequence: ASO sequence
  misc_feature 1..14: note = Note: the sequence may be DNA or RNA
  source 1..14: mol_type = other RNA
atagccccccggag

SEQ ID NO: 2114 - RNA, 14 nt, synthetic construct
  variation 1..14: note = Description of Sequence: ASO sequence
  misc_feature 1..14: note = Note: the sequence may be DNA or RNA
  source 1..14: mol_type = other RNA
catagccccccgga

SEQ ID NO: 2115 - RNA, 14 nt, synthetic construct
  variation 1..14: note = Description of Sequence: ASO sequence
  misc_feature 1..14: note = Note: the sequence may be DNA or RNA
  source 1..14: mol_type = other RNA
ccatagccccccgg

SEQ ID NO: 2116 - RNA, 14 nt, synthetic construct
  variation 1..14: note = Description of Sequence: ASO sequence
  misc_feature 1..14: note = Note: the sequence may be DNA or RNA
  source 1..14: mol_type = other RNA
gccatagccccccg

SEQ ID NO: 2117 - RNA, 14 nt, synthetic construct
  variation 1..14: note = Description of Sequence: ASO sequence
  misc_feature 1..14: note = Note: the sequence may be DNA or RNA
  source 1..14: mol_type = other RNA
tgccatagcccccc

SEQ ID NO: 2118 - RNA, 14 nt, synthetic construct
  variation 1..14: note = Description of Sequence: ASO sequence
  misc_feature 1..14: note = Note: the sequence may be DNA or RNA
  source 1..14: mol_type = other RNA
ctgccatagccccc

SEQ ID NO: 2119 - RNA, 14 nt, synthetic construct
  variation 1..14: note = Description of Sequence: ASO sequence
  misc_feature 1..14: note = Note: the sequence may be DNA or RNA
  source 1..14: mol_type = other RNA
actgccatagcccc

SEQ ID NO: 2120 - RNA, 14 nt, synthetic construct
  variation 1..14: note = Description of Sequence: ASO sequence
  misc_feature 1..14: note = Note: the sequence may be DNA or RNA
  source 1..14: mol_type = other RNA
cactgccatagccc

SEQ ID NO: 2121 - RNA, 14 nt, synthetic construct
  variation 1..14: note = Description of Sequence: ASO sequence
  misc_feature 1..14: note = Note: the sequence may be DNA or RNA
  source 1..14: mol_type = other RNA
gcactgccatagcc

SEQ ID NO: 2122 - RNA, 14 nt, synthetic construct
  variation 1..14: note = Description of Sequence: ASO sequence
  misc_feature 1..14: note = Note: the sequence may be DNA or RNA
  source 1..14: mol_type = other RNA
ggcactgccatagc

SEQ ID NO: 2123 - RNA, 14 nt, synthetic construct
  variation 1..14: note = Description of Sequence: ASO sequence
  misc_feature 1..14: note = Note: the sequence may be DNA or RNA
  source 1..14: mol_type = other RNA
tggcactgccatag

SEQ ID NO: 2124 - RNA, 14 nt, synthetic construct
  variation 1..14: note = Description of Sequence: ASO sequence
  misc_feature 1..14: note = Note: the sequence may be DNA or RNA
  source 1..14: mol_type = other RNA
ctggcactgccata

SEQ ID NO: 2125 - RNA, 14 nt, synthetic construct
  variation 1..14: note = Description of Sequence: ASO sequence
  misc_feature 1..14: note = Note: the sequence may be DNA or RNA
  source 1..14: mol_type = other RNA
cctggcactgccat

SEQ ID NO: 2126 - RNA, 14 nt, synthetic construct
  variation 1..14: note = Description of Sequence: ASO sequence
  misc_feature 1..14: note = Note: the sequence may be DNA or RNA
  source 1..14: mol_type = other RNA
tcctggcactgcca

SEQ ID NO: 2127 - RNA, 14 nt, synthetic construct
  variation 1..14: note = Description of Sequence: ASO sequence
  misc_feature 1..14: note = Note: the sequence may be DNA or RNA
  source 1..14: mol_type = other RNA
gtcctggcactgcc

SEQ ID NO: 2128 - RNA, 14 nt, synthetic construct
  variation 1..14: note = Description of Sequence: ASO sequence
  misc_feature 1..14: note = Note: the sequence may be DNA or RNA
  source 1..14: mol_type = other RNA
ggtcctggcactgc

SEQ ID NO: 2129 - RNA, 14 nt, synthetic construct
  variation 1..14: note = Description of Sequence: ASO sequence
  misc_feature 1..14: note = Note: the sequence may be DNA or RNA
  source 1..14: mol_type = other RNA
aggtcctggcactg

SEQ ID NO: 2130 - RNA, 14 nt, synthetic construct
  variation 1..14: note = Description of Sequence: ASO sequence
  misc_feature 1..14: note = Note: the sequence may be DNA or RNA
  source 1..14: mol_type = other RNA
caggtcctggcact

SEQ ID NO: 2131 - RNA, 14 nt, synthetic construct
  variation 1..14: note = Description of Sequence: ASO sequence
  misc_feature 1..14: note = Note: the sequence may be DNA or RNA
  source 1..14: mol_type = other RNA
gcaggtcctggcac

SEQ ID NO: 2132 - RNA, 14 nt, synthetic construct
  variation 1..14: note = Description of Sequence: ASO sequence
  misc_feature 1..14: note = Note: the sequence may be DNA or RNA
  source 1..14: mol_type = other RNA
ggcaggtcctggca

SEQ ID NO: 2133 - RNA, 14 nt, synthetic construct
  variation 1..14: note = Description of Sequence: ASO sequence
  misc_feature 1..14: note = Note: the sequence may be DNA or RNA
  source 1..14: mol_type = other RNA
cggcaggtcctggc

SEQ ID NO: 2134 - RNA, 14 nt, synthetic construct
  variation 1..14: note = Description of Sequence: ASO sequence
  misc_feature 1..14: note = Note: the sequence may be DNA or RNA
  source 1..14: mol_type = other RNA
acggcaggtcctgg

SEQ ID NO: 2135 - RNA, 14 nt, synthetic construct
  variation 1..14: note = Description of Sequence: ASO sequence
  misc_feature 1..14: note = Note: the sequence may be DNA or RNA
  source 1..14: mol_type = other RNA
cacggcaggtcctg

SEQ ID NO: 2136 - RNA, 14 nt, synthetic construct
  variation 1..14: note = Description of Sequence: ASO sequence
  misc_feature 1..14: note = Note: the sequence may be DNA or RNA
  source 1..14: mol_type = other RNA
gcacggcaggtcct

SEQ ID NO: 2137 - RNA, 14 nt, synthetic construct
  variation 1..14: note = Description of Sequence: ASO sequence
  misc_feature 1..14: note = Note: the sequence may be DNA or RNA
  source 1..14: mol_type = other RNA
ggcacggcaggtcc

SEQ ID NO: 2138 - RNA, 14 nt, synthetic construct
  variation 1..14: note = Description of Sequence: ASO sequence
  misc_feature 1..14: note = Note: the sequence may be DNA or RNA
  source 1..14: mol_type = other RNA
gggcacggcaggtc

SEQ ID NO: 2139 - RNA, 14 nt, synthetic construct
  variation 1..14: note = Description of Sequence: ASO sequence
  misc_feature 1..14: note = Note: the sequence may be DNA or RNA
  source 1..14: mol_type = other RNA
agggcacggcaggt

SEQ ID NO: 2140 - RNA, 14 nt, synthetic construct
  variation 1..14: note = Description of Sequence: ASO sequence
  misc_feature 1..14: note = Note: the sequence may be DNA or RNA
  source 1..14: mol_type = other RNA
cagggcacggcagg

SEQ ID NO: 2141 - RNA, 14 nt, synthetic construct
  variation 1..14: note = Description of Sequence: ASO sequence
  misc_feature 1..14: note = Note: the sequence may be DNA or RNA
  source 1..14: mol_type = other RNA
ccagggcacggcag

SEQ ID NO: 2142 - RNA, 14 nt, synthetic construct
  variation 1..14: note = Description of Sequence: ASO sequence
  misc_feature 1..14: note = Note: the sequence may be DNA or RNA
  source 1..14: mol_type = other RNA
gccagggcacggca

SEQ ID NO: 2143 - RNA, 14 nt, synthetic construct
  variation 1..14: note = Description of Sequence: ASO sequence
  misc_feature 1..14: note = Note: the sequence may be DNA or RNA
  source 1..14: mol_type = other RNA
tgccagggcacggc

SEQ ID NO: 2144 - RNA, 14 nt, synthetic construct
  variation 1..14: note = Description of Sequence: ASO sequence
  misc_feature 1..14: note = Note: the sequence may be DNA or RNA
  source 1..14: mol_type = other RNA
gtgccagggcacgg

SEQ ID NO: 2145 - RNA, 14 nt, synthetic construct
  variation 1..14: note = Description of Sequence: ASO sequence
  misc_feature 1..14: note = Note: the sequence may be DNA or RNA
  source 1..14: mol_type = other RNA
ggtgccagggcacg

SEQ ID NO: 2146 - RNA, 14 nt, synthetic construct
  variation 1..14: note = Description of Sequence: ASO sequence
  misc_feature 1..14: note = Note: the sequence may be DNA or RNA
  source 1..14: mol_type = other RNA
aggtgccagggcac

SEQ ID NO: 2147 - RNA, 14 nt, synthetic construct
  variation 1..14: note = Description of Sequence: ASO sequence
  misc_feature 1..14: note = Note: the sequence may be DNA or RNA
  source 1..14: mol_type = other RNA
caggtgccagggca

SEQ ID NO: 2148 - RNA, 14 nt, synthetic construct
  variation 1..14: note = Description of Sequence: ASO sequence
  misc_feature 1..14: note = Note: the sequence may be DNA or RNA
  source 1..14: mol_type = other RNA
gcaggtgccagggc

SEQ ID NO: 2149 - RNA, 14 nt, synthetic construct
  variation 1..14: note = Description of Sequence: ASO sequence
  misc_feature 1..14: note = Note: the sequence may be DNA or RNA
  source 1..14: mol_type = other RNA
agcaggtgccaggg

SEQ ID NO: 2150 - RNA, 14 nt, synthetic construct
  variation 1..14: note = Description of Sequence: ASO sequence
  misc_feature 1..14: note = Note: the sequence may be DNA or RNA
  source 1..14: mol_type = other RNA
gagcaggtgccagg

SEQ ID NO: 2151 - RNA, 14 nt, synthetic construct
  variation 1..14: note = Description of Sequence: ASO sequence
  misc_feature 1..14: note = Note: the sequence may be DNA or RNA
  source 1..14: mol_type = other RNA
agagcaggtgccag

SEQ ID NO: 2152 - RNA, 14 nt, synthetic construct
  variation 1..14: note = Description of Sequence: ASO sequence
  misc_feature 1..14: note = Note: the sequence may be DNA or RNA
  source 1..14: mol_type = other RNA
cagagcaggtgcca

SEQ ID NO: 2153 - RNA, 14 nt, synthetic construct
  variation 1..14: note = Description of Sequence: ASO sequence
  misc_feature 1..14: note = Note: the sequence may be DNA or RNA
  source 1..14: mol_type = other RNA
acagagcaggtgcc

SEQ ID NO: 2154 - RNA, 14 nt, synthetic construct
  variation 1..14: note = Description of Sequence: ASO sequence
  misc_feature 1..14: note = Note: the sequence may be DNA or RNA
  source 1..14: mol_type = other RNA
cacagagcaggtgc

SEQ ID NO: 2155 - RNA, 14 nt, synthetic construct
  variation 1..14: note = Description of Sequence: ASO sequence
  misc_feature 1..14: note = Note: the sequence may be DNA or RNA
  source 1..14: mol_type = other RNA
gcacagagcaggtg

SEQ ID NO: 2156 - RNA, 14 nt, synthetic construct
  variation 1..14: note = Description of Sequence: ASO sequence
  misc_feature 1..14: note = Note: the sequence may be DNA or RNA
  source 1..14: mol_type = other RNA
tgcacagagcaggt

SEQ ID NO: 2157 - RNA, 14 nt, synthetic construct
  variation 1..14: note = Description of Sequence: ASO sequence
  misc_feature 1..14: note = Note: the sequence may be DNA or RNA
  source 1..14: mol_type = other RNA
ctgcacagagcagg

SEQ ID NO: 2158 - RNA, 14 nt, synthetic construct
  variation 1..14: note = Description of Sequence: ASO sequence
  misc_feature 1..14: note = Note: the sequence may be DNA or RNA
  source 1..14: mol_type = other RNA
cctgcacagagcag

SEQ ID NO: 2159 - RNA, 14 nt, synthetic construct
  variation 1..14: note = Description of Sequence: ASO sequence
  misc_feature 1..14: note = Note: the sequence may be DNA or RNA
  source 1..14: mol_type = other RNA
ccctgcacagagca

SEQ ID NO: 2160 - RNA, 14 nt, synthetic construct
  variation 1..14: note = Description of Sequence: ASO sequence
  misc_feature 1..14: note = Note: the sequence may be DNA or RNA
  source 1..14: mol_type = other RNA
gccctgcacagagc

SEQ ID NO: 2161 - RNA, 14 nt, synthetic construct
  variation 1..14: note = Description of Sequence: ASO sequence
  misc_feature 1..14: note = Note: the sequence may be DNA or RNA
  source 1..14: mol_type = other RNA
cgccctgcacagag

SEQ ID NO: 2162 - RNA, 14 nt, synthetic construct
  variation 1..14: note = Description of Sequence: ASO sequence
  misc_feature 1..14: note = Note: the sequence may be DNA or RNA
  source 1..14: mol_type = other RNA
ccgccctgcacaga

SEQ ID NO: 2163 - RNA, 14 nt, synthetic construct
  variation 1..14: note = Description of Sequence: ASO sequence
  misc_feature 1..14: note = Note: the sequence may be DNA or RNA
  source 1..14: mol_type = other RNA
cccgccctgcacag

SEQ ID NO: 2164 - RNA, 14 nt, synthetic construct
  variation 1..14: note = Description of Sequence: ASO sequence
  misc_feature 1..14: note = Note: the sequence may be DNA or RNA
  source 1..14: mol_type = other RNA
ccccgccctgcaca

SEQ ID NO: 2165 - RNA, 14 nt, synthetic construct
  variation 1..14: note = Description of Sequence: ASO sequence
  misc_feature 1..14: note = Note: the sequence may be DNA or RNA
  source 1..14: mol_type = other RNA
gccccgccctgcac

SEQ ID NO: 2166 - RNA, 14 nt, synthetic construct
  variation 1..14: note = Description of Sequence: ASO sequence
  misc_feature 1..14: note = Note: the sequence may be DNA or RNA
  source 1..14: mol_type = other RNA
ggccccgccctgca

SEQ ID NO: 2167 - RNA, 14 nt, synthetic construct
  variation 1..14: note = Description of Sequence: ASO sequence
  misc_feature 1..14: note = Note: the sequence may be DNA or RNA
  source 1..14: mol_type = other RNA
gggccccgccctgc

SEQ ID NO: 2168 - RNA, 14 nt, synthetic construct
  variation 1..14: note = Description of Sequence: ASO sequence
  misc_feature 1..14: note = Note: the sequence may be DNA or RNA
  source 1..14: mol_type = other RNA
tgggccccgccctg

SEQ ID NO: 2169 - RNA, 14 nt, synthetic construct
  variation 1..14: note = Description of Sequence: ASO sequence
  misc_feature 1..14: note = Note: the sequence may be DNA or RNA
  source 1..14: mol_type = other RNA
gtgggccccgccct

SEQ ID NO: 2170 - RNA, 14 nt, synthetic construct
  variation 1..14: note = Description of Sequence: ASO sequence
  misc_feature 1..14: note = Note: the sequence may be DNA or RNA
  source 1..14: mol_type = other RNA
tgtgggccccgccc

SEQ ID NO: 2171 - RNA, 14 nt, synthetic construct
  variation 1..14: note = Description of Sequence: ASO sequence
  misc_feature 1..14: note = Note: the sequence may be DNA or RNA
  source 1..14: mol_type = other RNA
atgtgggccccgcc

SEQ ID NO: 2172 - RNA, 14 nt, synthetic construct
  variation 1..14: note = Description of Sequence: ASO sequence
  misc_feature 1..14: note = Note: the sequence may be DNA or RNA
  source 1..14: mol_type = other RNA
gatgtgggccccgc

SEQ ID NO: 2173 - RNA, 14 nt, synthetic construct
  variation 1..14: note = Description of Sequence: ASO sequence
  misc_feature 1..14: note = Note: the sequence may be DNA or RNA
  source 1..14: mol_type = other RNA
agatgtgggccccg

SEQ ID NO: 2174 - RNA, 14 nt, synthetic construct
  variation 1..14: note = Description of Sequence: ASO sequence
  misc_feature 1..14: note = Note: the sequence may be DNA or RNA
  source 1..14: mol_type = other RNA
gagatgtgggcccc

SEQ ID NO: 2175 - RNA, 14 nt, synthetic construct
  variation 1..14: note = Description of Sequence: ASO sequence
  misc_feature 1..14: note = Note: the sequence may be DNA or RNA
  source 1..14: mol_type = other RNA
ggagatgtgggccc

SEQ ID NO: 2176 - RNA, 14 nt, synthetic construct
  variation 1..14: note = Description of Sequence: ASO sequence
  misc_feature 1..14: note = Note: the sequence may be DNA or RNA
  source 1..14: mol_type = other RNA
tggagatgtgggcc

SEQ ID NO: 2177 - RNA, 14 nt, synthetic construct
  variation 1..14: note = Description of Sequence: ASO sequence
  misc_feature 1..14: note = Note: the sequence may be DNA or RNA
  source 1..14: mol_type = other RNA
gtggagatgtgggc

SEQ ID NO: 2178 - RNA, 14 nt, synthetic construct
  variation 1..14: note = Description of Sequence: ASO sequence
  misc_feature 1..14: note = Note: the sequence may be DNA or RNA
  source 1..14: mol_type = other RNA
ggtggagatgtggg

SEQ ID NO: 2179 - RNA, 14 nt, synthetic construct
  variation 1..14: note = Description of Sequence: ASO sequence
  misc_feature 1..14: note = Note: the sequence may be DNA or RNA
  source 1..14: mol_type = other RNA
aggtggagatgtgg

SEQ ID NO: 2180 - RNA, 14 nt, synthetic construct
  variation 1..14: note = Description of Sequence: ASO sequence
  misc_feature 1..14: note = Note: the sequence may be DNA or RNA
  source 1..14: mol_type = other RNA
taggtggagatgtg

SEQ ID NO: 2181 - RNA, 14 nt, synthetic construct
  variation 1..14: note = Description of Sequence: ASO sequence
  misc_feature 1..14: note = Note: the sequence may be DNA or RNA
  source 1..14: mol_type = other RNA
ataggtggagatgt

SEQ ID NO: 2182 - RNA, 14 nt, synthetic construct
  variation 1..14: note = Description of Sequence: ASO sequence
  misc_feature 1..14: note = Note: the sequence may be DNA or RNA
  source 1..14: mol_type = other RNA
cataggtggagatg

SEQ ID NO: 2183 - RNA, 14 nt, synthetic construct
  variation 1..14: note = Description of Sequence: ASO sequence
  misc_feature 1..14: note = Note: the sequence may be DNA or RNA
  source 1..14: mol_type = other RNA
tcataggtggagat

SEQ ID NO: 2184 - RNA, 14 nt, synthetic construct
  variation 1..14: note = Description of Sequence: ASO sequence
  misc_feature 1..14: note = Note: the sequence may be DNA or RNA
  source 1..14: mol_type = other RNA
atcataggtggaga

SEQ ID NO: 2185 - RNA, 14 nt, synthetic construct
  variation 1..14: note = Description of Sequence: ASO sequence
  misc_feature 1..14: note = Note: the sequence may be DNA or RNA
  source 1..14: mol_type = other RNA
catcataggtggag

SEQ ID NO: 2186 - RNA, 14 nt, synthetic construct
  variation 1..14: note = Description of Sequence: ASO sequence
  misc_feature 1..14: note = Note: the sequence may be DNA or RNA
  source 1..14: mol_type = other RNA
tcatcataggtgga

SEQ ID NO: 2187 - RNA, 14 nt, synthetic construct
  variation 1..14: note = Description of Sequence: ASO sequence
  misc_feature 1..14: note = Note: the sequence may be DNA or RNA
  source 1..14: mol_type = other RNA
ctcatcataggtgg

SEQ ID NO: 2188 - RNA, 14 nt, synthetic construct
  variation 1..14: note = Description of Sequence: ASO sequence
  misc_feature 1..14: note = Note: the sequence may be DNA or RNA
  source 1..14: mol_type = other RNA
tctcatcataggtg

SEQ ID NO: 2189 - RNA, 14 nt, synthetic construct
  variation 1..14: note = Description of Sequence: ASO sequence
  misc_feature 1..14: note = Note: the sequence may be DNA or RNA
  source 1..14: mol_type = other RNA
ttctcatcataggt

SEQ ID NO: 2190 - RNA, 14 nt, synthetic construct
  variation 1..14: note = Description of Sequence: ASO sequence
  misc_feature 1..14: note = Note: the sequence may be DNA or RNA
  source 1..14: mol_type = other RNA
tttctcatcatagg

SEQ ID NO: 2191 - RNA, 14 nt, synthetic construct
  variation 1..14: note = Description of Sequence: ASO sequence
  misc_feature 1..14: note = Note: the sequence may be DNA or RNA
  source 1..14: mol_type = other RNA
gtttctcatcatag

SEQ ID NO: 2192 - RNA, 14 nt, synthetic construct
  variation 1..14: note = Description of Sequence: ASO sequence
  misc_feature 1..14: note = Note: the sequence may be DNA or RNA
  source 1..14: mol_type = other RNA
agtttctcatcata

SEQ ID NO: 2193 - RNA, 14 nt, synthetic construct
  variation 1..14: note = Description of Sequence: ASO sequence
  misc_feature 1..14: note = Note: the sequence may be DNA or RNA
  source 1..14: mol_type = other RNA
gagtttctcatcat

SEQ ID NO: 2194 - RNA, 14 nt, synthetic construct
  variation 1..14: note = Description of Sequence: ASO sequence
  misc_feature 1..14: note = Note: the sequence may be DNA or RNA
  source 1..14: mol_type = other RNA
agagtttctcatca

SEQ ID NO: 2195 - RNA, 14 nt, synthetic construct
  variation 1..14: note = Description of Sequence: ASO sequence
  misc_feature 1..14: note = Note: the sequence may be DNA or RNA
  source 1..14: mol_type = other RNA
tagagtttctcatc

SEQ ID NO: 2196 - RNA, 14 nt, synthetic construct
  variation 1..14: note = Description of Sequence: ASO sequence
  misc_feature 1..14: note = Note: the sequence may be DNA or RNA
  source 1..14: mol_type = other RNA
gtagagtttctcat

SEQ ID NO: 2197 - RNA, 14 nt, synthetic construct
  variation 1..14: note = Description of Sequence: ASO sequence
  misc_feature 1..14: note = Note: the sequence may be DNA or RNA
  source 1..14: mol_type = other RNA
cgtagagtttctca

SEQ ID NO: 2198 - RNA, 14 nt, synthetic construct
  variation 1..14: note = Description of Sequence: ASO sequence
  misc_feature 1..14: note = Note: the sequence may be DNA or RNA
  source 1..14: mol_type = other RNA
tcgtagagtttctc

SEQ ID NO: 2199 - RNA, 14 nt, synthetic construct
  variation 1..14: note = Description of Sequence: ASO sequence
  misc_feature 1..14: note = Note: the sequence may be DNA or RNA
  source 1..14: mol_type = other RNA
gtcgtagagtttct

SEQ ID NO: 2200 - RNA, 14 nt, synthetic construct
  variation 1..14: note = Description of Sequence: ASO sequence
  misc_feature 1..14: note = Note: the sequence may be DNA or RNA
  source 1..14: mol_type = other RNA
ggtcgtagagtttc

SEQ ID NO: 2201 - RNA, 14 nt, synthetic construct
  variation 1..14: note = Description of Sequence: ASO sequence
  misc_feature 1..14: note = Note: the sequence may be DNA or RNA
  source 1..14: mol_type = other RNA
aggtcgtagagttt

SEQ ID NO: 2202 - RNA, 14 nt, synthetic construct
  variation 1..14: note = Description of Sequence: ASO sequence
  misc_feature 1..14: note = Note: the sequence may be DNA or RNA
  source 1..14: mol_type = other RNA
caggtcgtagagtt

SEQ ID NO: 2203 - RNA, 14 nt, synthetic construct
  variation 1..14: note = Description of Sequence: ASO sequence
  misc_feature 1..14: note = Note: the sequence may be DNA or RNA
  source 1..14: mol_type = other RNA
gcaggtcgtagagt

SEQ ID NO: 2204 - RNA, 14 nt, synthetic construct
  variation 1..14: note = Description of Sequence: ASO sequence
  misc_feature 1..14: note = Note: the sequence may be DNA or RNA
  source 1..14: mol_type = other RNA
tgcaggtcgtagag

SEQ ID NO: 2205 - RNA, 14 nt, synthetic construct
  variation 1..14: note = Description of Sequence: ASO sequence
  misc_feature 1..14: note = Note: the sequence may be DNA or RNA
  source 1..14: mol_type = other RNA
atgcaggtcgtaga

SEQ ID NO: 2206 - RNA, 14 nt, synthetic construct
  variation 1..14: note = Description of Sequence: ASO sequence
  misc_feature 1..14: note = Note: the sequence may be DNA or RNA
  source 1..14: mol_type = other RNA
catgcaggtcgtag

SEQ ID NO: 2207 - RNA, 14 nt, synthetic construct
  variation 1..14: note = Description of Sequence: ASO sequence
  misc_feature 1..14: note = Note: the sequence may be DNA or RNA
  source 1..14: mol_type = other RNA
ccatgcaggtcgta

SEQ ID NO: 2208 - RNA, 14 nt, synthetic construct
  variation 1..14: note = Description of Sequence: ASO sequence
  misc_feature 1..14: note = Note: the sequence may be DNA or RNA
  source 1..14: mol_type = other RNA
accatgcaggtcgt

SEQ ID NO: 2209 - RNA, 14 nt, synthetic construct
  variation 1..14: note = Description of Sequence: ASO sequence
  misc_feature 1..14: note = Note: the sequence may be DNA or RNA
  source 1..14: mol_type = other RNA
caccatgcaggtcg

SEQ ID NO: 2210 - RNA, 14 nt, synthetic construct
  variation 1..14: note = Description of Sequence: ASO sequence
  misc_feature 1..14: note = Note: the sequence may be DNA or RNA
  source 1..14: mol_type = other RNA
tcaccatgcaggtc

SEQ ID NO: 2211 - RNA, 14 nt, synthetic construct
  variation 1..14: note = Description of Sequence: ASO sequence
  misc_feature 1..14: note = Note: the sequence may be DNA or RNA
  source 1..14: mol_type = other RNA
gtcaccatgcaggt

SEQ ID NO: 2212 - RNA, 14 nt, synthetic construct
  variation 1..14: note = Description of Sequence: ASO sequence
  misc_feature 1..14: note = Note: the sequence may be DNA or RNA
  source 1..14: mol_type = other RNA
agtcaccatgcagg

SEQ ID NO: 2213 - RNA, 14 nt, synthetic construct
  variation 1..14: note = Description of Sequence: ASO sequence
  misc_feature 1..14: note = Note: the sequence may be DNA or RNA
  source 1..14: mol_type = other RNA
cagtcaccatgcag

SEQ ID NO: 2214 - RNA, 14 nt, synthetic construct
  variation 1..14: note = Description of Sequence: ASO sequence
  misc_feature 1..14: note = Note: the sequence may be DNA or RNA
  source 1..14: mol_type = other RNA
gcagtcaccatgca

SEQ ID NO: 2215 - RNA, 14 nt, synthetic construct
  variation 1..14: note = Description of Sequence: ASO sequence
  misc_feature 1..14: note = Note: the sequence may be DNA or RNA
  source 1..14: mol_type = other RNA
tgcagtcaccatgc

SEQ ID NO: 2216 - RNA, 14 nt, synthetic construct
  variation 1..14: note = Description of Sequence: ASO sequence
  misc_feature 1..14: note = Note: the sequence may be DNA or RNA
  source 1..14: mol_type = other RNA
ctgcagtcaccatg

SEQ ID NO: 2217 - RNA, 14 nt, synthetic construct
  variation 1..14: note = Description of Sequence: ASO sequence
  misc_feature 1..14: note = Note: the sequence may be DNA or RNA
  source 1..14: mol_type = other RNA
gctgcagtcaccat

SEQ ID NO: 2218 - RNA, 14 nt, synthetic construct
  variation 1..14: note = Description of Sequence: ASO sequence
  misc_feature 1..14: note = Note: the sequence may be DNA or RNA
  source 1..14: mol_type = other RNA
agctgcagtcacca

SEQ ID NO: 2219 - RNA, 14 nt, synthetic construct
  variation 1..14: note = Description of Sequence: ASO sequence
  misc_feature 1..14: note = Note: the sequence may be DNA or RNA
  source 1..14: mol_type = other RNA
tagctgcagtcacc

SEQ ID NO: 2220 - RNA, 14 nt, synthetic construct
  variation 1..14: note = Description of Sequence: ASO sequence
  misc_feature 1..14: note = Note: the sequence may be DNA or RNA
  source 1..14: mol_type = other RNA
gtagctgcagtcac

SEQ ID NO: 2221 - RNA, 14 nt, synthetic construct
  variation 1..14: note = Description of Sequence: ASO sequence
  misc_feature 1..14: note = Note: the sequence may be DNA or RNA
  source 1..14: mol_type = other RNA
cgtagctgcagtca

SEQ ID NO: 2222 - RNA, 14 nt, synthetic construct
  variation 1..14: note = Description of Sequence: ASO sequence
  misc_feature 1..14: note = Note: the sequence may be DNA or RNA
  source 1..14: mol_type = other RNA
acgtagctgcagtc

SEQ ID NO: 2223 - RNA, 14 nt, synthetic construct
  variation 1..14: note = Description of Sequence: ASO sequence
  misc_feature 1..14: note = Note: the sequence may be DNA or RNA
  source 1..14: mol_type = other RNA
aacgtagctgcagt

SEQ ID NO: 2224 - RNA, 14 nt, synthetic construct
  variation 1..14: note = Description of Sequence: ASO sequence
  misc_feature 1..14: note = Note: the sequence may be DNA or RNA
  source 1..14: mol_type = other RNA
gaacgtagctgcag

SEQ ID NO: 2225 - RNA, 14 nt, synthetic construct
  variation 1..14: note = Description of Sequence: ASO sequence
  misc_feature 1..14: note = Note: the sequence may be DNA or RNA
  source 1..14: mol_type = other RNA
agaacgtagctgca

SEQ ID NO: 2226 - RNA, 14 nt, synthetic construct
  variation 1..14: note = Description of Sequence: ASO sequence
  misc_feature 1..14: note = Note: the sequence may be DNA or RNA
  source 1..14: mol_type = other RNA
cagaacgtagctgc

SEQ ID NO: 2227 - RNA, 14 nt, synthetic construct
  variation 1..14: note = Description of Sequence: ASO sequence
  misc_feature 1..14: note = Note: the sequence may be DNA or RNA
  source 1..14: mol_type = other RNA
acagaacgtagctg

SEQ ID NO: 2228 - RNA, 14 nt, synthetic construct
  variation 1..14: note = Description of Sequence: ASO sequence
  misc_feature 1..14: note = Note: the sequence may be DNA or RNA
  source 1..14: mol_type = other RNA
gacagaacgtagct

SEQ ID NO: 2229 - RNA, 14 nt, synthetic construct
  variation 1..14: note = Description of Sequence: ASO sequence
  misc_feature 1..14: note = Note: the sequence may be DNA or RNA
  source 1..14: mol_type = other RNA
ggacagaacgtagc

SEQ ID NO: 2230 - RNA, 14 nt, synthetic construct
  variation 1..14: note = Description of Sequence: ASO sequence
  misc_feature 1..14: note = Note: the sequence may be DNA or RNA
  source 1..14: mol_type = other RNA
tggacagaacgtag

SEQ ID NO: 2231 - RNA, 14 nt, synthetic construct
  variation 1..14: note = Description of Sequence: ASO sequence
  misc_feature 1..14: note = Note: the sequence may be DNA or RNA
  source 1..14: mol_type = other RNA
ttggacagaacgta

SEQ ID NO: 2232 - RNA, 14 nt, synthetic construct
  variation 1..14: note = Description of Sequence: ASO sequence
  misc_feature 1..14: note = Note: the sequence may be DNA or RNA
  source 1..14: mol_type = other RNA
cttggacagaacgt

SEQ ID NO: 2233 - RNA, 14 nt, synthetic construct
  variation 1..14: note = Description of Sequence: ASO sequence
  misc_feature 1..14: note = Note: the sequence may be DNA or RNA
  source 1..14: mol_type = other RNA
tggacccggatggc

SEQ ID NO: 2234 - RNA, 14 nt, synthetic construct
  variation 1..14: note = Description of Sequence: ASO sequence
  misc_feature 1..14: note = Note: the sequence may be DNA or RNA
  source 1..14: mol_type = other RNA
ttggacccggatgg

SEQ ID NO: 2235 - RNA, 14 nt, synthetic construct
  variation 1..14: note = Description of Sequence: ASO sequence
  misc_feature 1..14: note = Note: the sequence may be DNA or RNA
  source 1..14: mol_type = other RNA
cttggacccggatg

SEQ ID NO: 2236 - RNA, 14 nt, synthetic construct
  variation 1..14: note = Description of Sequence: ASO sequence
  misc_feature 1..14: note = Note: the sequence may be DNA or RNA
  source 1..14: mol_type = other RNA
gcttggacccggat

SEQ ID NO: 2237 - RNA, 14 nt, synthetic construct
  variation 1..14: note = Description of Sequence: ASO sequence
  misc_feature 1..14: note = Note: the sequence may be DNA or RNA
  source 1..14: mol_type = other RNA
cgcttggacccgga

SEQ ID NO: 2238 - RNA, 14 nt, synthetic construct
  variation 1..14: note = Description of Sequence: ASO sequence
  misc_feature 1..14: note = Note: the sequence may be DNA or RNA
  source 1..14: mol_type = other RNA
ccgcttggacccgg

SEQ ID NO: 2239 - RNA, 14 nt, synthetic construct
  variation 1..14: note = Description of Sequence: ASO sequence
  misc_feature 1..14: note = Note: the sequence may be DNA or RNA
  source 1..14: mol_type = other RNA
tccgcttggacccg

SEQ ID NO: 2240 - RNA, 14 nt, synthetic construct
  variation 1..14: note = Description of Sequence: ASO sequence
  misc_feature 1..14: note = Note: the sequence may be DNA or RNA
  source 1..14: mol_type = other RNA
gtccgcttggaccc

SEQ ID NO: 2241 - RNA, 14 nt, synthetic construct
  variation 1..14: note = Description of Sequence: ASO sequence
  misc_feature 1..14: note = Note: the sequence may be DNA or RNA
  source 1..14: mol_type = other RNA
cgtccgcttggacc

SEQ ID NO: 2242 - RNA, 14 nt, synthetic construct
  variation 1..14: note = Description of Sequence: ASO sequence
  misc_feature 1..14: note = Note: the sequence may be DNA or RNA
  source 1..14: mol_type = other RNA
ccgtccgcttggac

SEQ ID NO: 2243 - RNA, 14 nt, synthetic construct
  variation 1..14: note = Description of Sequence: ASO sequence
  misc_feature 1..14: note = Note: the sequence may be DNA or RNA
  source 1..14: mol_type = other RNA
gccgtccgcttgga

SEQ ID NO: 2244 - RNA, 14 nt, synthetic construct
  variation 1..14: note = Description of Sequence: ASO sequence
  misc_feature 1..14: note = Note: the sequence may be DNA or RNA
  source 1..14: mol_type = other RNA
cgccgtccgcttgg

SEQ ID NO: 2245 - RNA, 14 nt, synthetic construct
  variation 1..14: note = Description of Sequence: ASO sequence
  misc_feature 1..14: note = Note: the sequence may be DNA or RNA
  source 1..14: mol_type = other RNA
ccgccgtccgcttg

SEQ ID NO: 2246 - RNA, 14 nt, synthetic construct
  variation 1..14: note = Description of Sequence: ASO sequence
  misc_feature 1..14: note = Note: the sequence may be DNA or RNA
  source 1..14: mol_type = other RNA
gccgccgtccgctt

SEQ ID NO: 2247 - RNA, 14 nt, synthetic construct
  variation 1..14: note = Description of Sequence: ASO sequence
  misc_feature 1..14: note = Note: the sequence may be DNA or RNA
  source 1..14: mol_type = other RNA
cgccgccgtccgct

SEQ ID NO: 2248 - RNA, 14 nt, synthetic construct
  variation 1..14: note = Description of Sequence: ASO sequence
  misc_feature 1..14: note = Note: the sequence may be DNA or RNA
  source 1..14: mol_type = other RNA
acgccgccgtccgc

SEQ ID NO: 2249 - RNA, 14 nt, synthetic construct
  variation 1..14: note = Description of Sequence: ASO sequence
  misc_feature 1..14: note = Note: the sequence may be DNA or RNA
  source 1..14: mol_type = other RNA
cacgccgccgtccg

SEQ ID NO: 2250 - RNA, 14 nt, synthetic construct
  variation 1..14: note = Description of Sequence: ASO sequence
  misc_feature 1..14: note = Note: the sequence may be DNA or RNA
  source 1..14: mol_type = other RNA
acacgccgccgtcc

SEQ ID NO: 2251 - RNA, 14 nt, synthetic construct
  variation 1..14: note = Description of Sequence: ASO sequence
  misc_feature 1..14: note = Note: the sequence may be DNA or RNA
  source 1..14: mol_type = other RNA
aacacgccgccgtc

SEQ ID NO: 2252 - RNA, 14 nt, synthetic construct
  variation 1..14: note = Description of Sequence: ASO sequence
  misc_feature 1..14: note = Note: the sequence may be DNA or RNA
  source 1..14: mol_type = other RNA
gaacacgccgccgt

SEQ ID NO: 2253 - RNA, 14 nt, synthetic construct
  variation 1..14: note = Description of Sequence: ASO sequence
  misc_feature 1..14: note = Note: the sequence may be DNA or RNA
  source 1..14: mol_type = other RNA
ggaacacgccgccg

SEQ ID NO: 2254 - RNA, 14 nt, synthetic construct
  variation 1..14: note = Description of Sequence: ASO sequence
  misc_feature 1..14: note = Note: the sequence may be DNA or RNA
  source 1..14: mol_type = other RNA
aggaacacgccgcc

SEQ ID NO: 2255 - RNA, 14 nt, synthetic construct
  variation 1..14: note = Description of Sequence: ASO sequence
  misc_feature 1..14: note = Note: the sequence may be DNA or RNA
  source 1..14: mol_type = other RNA
gaggaacacgccgc

SEQ ID NO: 2256 - RNA, 14 nt, synthetic construct
  variation 1..14: note = Description of Sequence: ASO sequence
  misc_feature 1..14: note = Note: the sequence may be DNA or RNA
  source 1..14: mol_type = other RNA
tgaggaacacgccg

SEQ ID NO: 2257 - RNA, 14 nt, synthetic construct
  variation 1..14: note = Description of Sequence: ASO sequence
  misc_feature 1..14: note = Note: the sequence may be DNA or RNA
  source 1..14: mol_type = other RNA
ttgaggaacacgcc

SEQ ID NO: 2258 - RNA, 14 nt, synthetic construct
  variation 1..14: note = Description of Sequence: ASO sequence
  misc_feature 1..14: note = Note: the sequence may be DNA or RNA
  source 1..14: mol_type = other RNA
gttgaggaacacgc

SEQ ID NO: 2259 - RNA, 14 nt, synthetic construct
  variation 1..14: note = Description of Sequence: ASO sequence
  misc_feature 1..14: note = Note: the sequence may be DNA or RNA
  source 1..14: mol_type = other RNA
agttgaggaacacg

SEQ ID NO: 2260 - RNA, 14 nt, synthetic construct
  variation 1..14: note = Description of Sequence: ASO sequence
  misc_feature 1..14: note = Note: the sequence may be DNA or RNA
  source 1..14: mol_type = other RNA
gagttgaggaacac

SEQ ID NO: 2261 - RNA, 14 nt, synthetic construct
  variation 1..14: note = Description of Sequence: ASO sequence
  misc_feature 1..14: note = Note: the sequence may be DNA or RNA
  source 1..14: mol_type = other RNA
ggagttgaggaaca

SEQ ID NO: 2262 - RNA, 14 nt, synthetic construct
  variation 1..14: note = Description of Sequence: ASO sequence
  misc_feature 1..14: note = Note: the sequence may be DNA or RNA
  source 1..14: mol_type = other RNA
tggagttgaggaac

SEQ ID NO: 2263 - RNA, 14 nt, synthetic construct
  variation 1..14: note = Description of Sequence: ASO sequence
  misc_feature 1..14: note = Note: the sequence may be DNA or RNA
  source 1..14: mol_type = other RNA
atggagttgaggaa

SEQ ID NO: 2264 - RNA, 14 nt, synthetic construct
  variation 1..14: note = Description of Sequence: ASO sequence
  misc_feature 1..14: note = Note: the sequence may be DNA or RNA
  source 1..14: mol_type = other RNA
gatggagttgagga

SEQ ID NO: 2265 - RNA, 14 nt, synthetic construct
  variation 1..14: note = Description of Sequence: ASO sequence
  misc_feature 1..14: note = Note: the sequence may be DNA or RNA
  source 1..14: mol_type = other RNA
agatggagttgagg

SEQ ID NO: 2266 - RNA, 14 nt, synthetic construct
  variation 1..14: note = Description of Sequence: ASO sequence
  misc_feature 1..14: note = Note: the sequence may be DNA or RNA
  source 1..14: mol_type = other RNA
tagatggagttgag

SEQ ID NO: 2267 - RNA, 14 nt, synthetic construct
  variation 1..14: note = Description of Sequence: ASO sequence
  misc_feature 1..14: note = Note: the sequence may be DNA or RNA
  source 1..14: mol_type = other RNA
gtagatggagttga

SEQ ID NO: 2268 - RNA, 14 nt, synthetic construct
  variation 1..14: note = Description of Sequence: ASO sequence
  misc_feature 1..14: note = Note: the sequence may be DNA or RNA
  source 1..14: mol_type = other RNA
tgtagatggagttg

SEQ ID NO: 2269 - RNA, 14 nt, synthetic construct
  variation 1..14: note = Description of Sequence: ASO sequence
  misc_feature 1..14: note = Note: the sequence may be DNA or RNA
  source 1..14: mol_type = other RNA
gtgtagatggagtt

SEQ ID NO: 2270 - RNA, 14 nt, synthetic construct
  variation 1..14: note = Description of Sequence: ASO sequence
  misc_feature 1..14: note = Note: the sequence may be DNA or RNA
  source 1..14: mol_type = other RNA
cgtgtagatggagt

SEQ ID NO: 2271 - RNA, 14 nt, synthetic construct
  variation 1..14: note = Description of Sequence: ASO sequence
  misc_feature 1..14: note = Note: the sequence may be DNA or RNA
  source 1..14: mol_type = other RNA
gcgtgtagatggag

SEQ ID NO: 2272 - RNA, 14 nt, synthetic construct
  variation 1..14: note = Description of Sequence: ASO sequence
  misc_feature 1..14: note = Note: the sequence may be DNA or RNA
  source 1..14: mol_type = other RNA
tgcgtgtagatgga

SEQ ID NO: 2273 - RNA, 14 nt, synthetic construct
  variation 1..14: note = Description of Sequence: ASO sequence
  misc_feature 1..14: note = Note: the sequence may be DNA or RNA
  source 1..14: mol_type = other RNA
ctgcgtgtagatgg

SEQ ID NO: 2274 - RNA, 14 nt, synthetic construct
  variation 1..14: note = Description of Sequence: ASO sequence
  misc_feature 1..14: note = Note: the sequence may be DNA or RNA
  source 1..14: mol_type = other RNA
gctgcgtgtagatg

SEQ ID NO: 2275 - RNA, 14 nt, synthetic construct
  variation 1..14: note = Description of Sequence: ASO sequence
  misc_feature 1..14: note = Note: the sequence may be DNA or RNA
  source 1..14: mol_type = other RNA
agctgcgtgtagat

SEQ ID NO: 2276 - RNA, 14 nt, synthetic construct
  variation 1..14: note = Description of Sequence: ASO sequence
  misc_feature 1..14: note = Note: the sequence may be DNA or RNA
  source 1..14: mol_type = other RNA
cagctgcgtgtaga

SEQ ID NO: 2277 - RNA, 14 nt, synthetic construct
  variation 1..14: note = Description of Sequence: ASO sequence
  misc_feature 1..14: note = Note: the sequence may be DNA or RNA
  source 1..14: mol_type = other RNA
gcagctgcgtgtag

SEQ ID NO: 2278 - RNA, 14 nt, synthetic construct
  variation 1..14: note = Description of Sequence: ASO sequence
  misc_feature 1..14: note = Note: the sequence may be DNA or RNA
  source 1..14: mol_type = other RNA
ggcagctgcgtgta

SEQ ID NO: 2279 - RNA, 14 nt, synthetic construct
  variation 1..14: note = Description of Sequence: ASO sequence
  misc_feature 1..14: note = Note: the sequence may be DNA or RNA
  source 1..14: mol_type = other RNA
gggcagctgcgtgt

SEQ ID NO: 2280 - RNA, 14 nt, synthetic construct
  variation 1..14: note = Description of Sequence: ASO sequence
  misc_feature 1..14: note = Note: the sequence may be DNA or RNA
  source 1..14: mol_type = other RNA
ggggcagctgcgtg

SEQ ID NO: 2281 - RNA, 14 nt, synthetic construct
  variation 1..14: note = Description of Sequence: ASO sequence
  misc_feature 1..14: note = Note: the sequence may be DNA or RNA
  source 1..14: mol_type = other RNA
aggggcagctgcgt

SEQ ID NO: 2282 - RNA, 14 nt, synthetic construct
  variation 1..14: note = Description of Sequence: ASO sequence
  misc_feature 1..14: note = Note: the sequence may be DNA or RNA
  source 1..14: mol_type = other RNA
caggggcagctgcg

SEQ ID NO: 2283 - RNA, 14 nt, synthetic construct
  variation 1..14: note = Description of Sequence: ASO sequence
  misc_feature 1..14: note = Note: the sequence may be DNA or RNA
  source 1..14: mol_type = other RNA
acaggggcagctgc

SEQ ID NO: 2284 - RNA, 14 nt, synthetic construct
  variation 1..14: note = Description of Sequence: ASO sequence
  misc_feature 1..14: note = Note: the sequence may be DNA or RNA
  source 1..14: mol_type = other RNA
gacaggggcagctg

SEQ ID NO: 2285 - RNA, 14 nt, synthetic construct
  variation 1..14: note = Description of Sequence: ASO sequence
  misc_feature 1..14: note = Note: the sequence may be DNA or RNA
  source 1..14: mol_type = other RNA
cgacaggggcagct

SEQ ID NO: 2286 - RNA, 14 nt, synthetic construct
  variation 1..14: note = Description of Sequence: ASO sequence
  misc_feature 1..14: note = Note: the sequence may be DNA or RNA
  source 1..14: mol_type = other RNA
ccgacaggggcagc

SEQ ID NO: 2287 - RNA, 14 nt, synthetic construct
  variation 1..14: note = Description of Sequence: ASO sequence
  misc_feature 1..14: note = Note: the sequence may be DNA or RNA
  source 1..14: mol_type = other RNA
gccgacaggggcag

SEQ ID NO: 2288 - RNA, 14 nt, synthetic construct
  variation 1..14: note = Description of Sequence: ASO sequence
  misc_feature 1..14: note = Note: the sequence may be DNA or RNA
  source 1..14: mol_type = other RNA
tgccgacaggggca

SEQ ID NO: 2289 - RNA, 14 nt, synthetic construct
  variation 1..14: note = Description of Sequence: ASO sequence
  misc_feature 1..14: note = Note: the sequence may be DNA or RNA
  source 1..14: mol_type = other RNA
ctgccgacaggggc

SEQ ID NO: 2290 - RNA, 262 nt, Homo sapiens
  source 1..262: mol_type = mRNA
cctccaacccggcgcacaacgggcgggtgtgcagcacctggggcagcttccactacaagaccttcgacggcgacgtcttccgcttccccggcctctgcaactacgtgttctccgagcactgcggtgccgcctacgaggattttaacatccagctacgccgcagccaggagtcagcggcccccacgctgagcagggtcctcatgaaggtggatggcgtggtcatccagctgaccaagggctccgtcctggtcaacggccaccc

SEQ ID NO: 2291 - RNA, 115 nt, Homo sapiens
  source 1..115: mol_type = mRNA
ggtcctgctgcccttcagccagtctggggtcctcattcagcagagcagcagctacaccaaggtggaggccaggctgggccttgtcctcatgtggaaccacgatgacagcctgctg

SEQ ID NO: 2292 - RNA, 91 nt, Homo sapiens
  source 1..91: mol_type = mRNA
ctggagctggacaccaaatacgccaacaagacctgtgggctctgtggggacttcaacgggatgcccgtggtcagcgagctcctctcccaca

SEQ ID NO: 2293 - RNA, 110 nt, Homo sapiens
  source 1..110: mol_type = mRNA
acaccaagctgacacccatggaattcgggaacctgcagaagatggacgaccccacggaccagtgtcaggaccctgtccctgaacccccgaggaactgctccactggcttt

SEQ ID NO: 2294 - RNA, 214 nt, Homo sapiens
  source 1..214: mol_type = mRNA
ggcatctgtgaggagctcctgcacggccagctgttctctggctgcgtggccctggtggacgtcggcagctacctggaggcttgcaggcaagacctctgcttctgtgaagacaccgacctgctcagctgcgtctgccacacccttgccgagtactcccggcagtgcacccatgcaggggggttgccccaggactggcggggccctgacttctgcc

SEQ ID NO: 2295 - RNA, 118 nt, Homo sapiens
  source 1..118: mol_type = mRNA
ggacggtgcttgacgacatcggccagaccggctgtgtccctgtgtcaaagtgtgcctgcgtctacaacggggctgcctatgccccaggggccacctactccacagactgcaccaactg

SEQ ID NO: 2296 - RNA, 139 nt, Homo sapiens
  source 1..139: mol_type = mRNA
cacctgctccggaggccggtggagctgccaggaggttccatgcccgggtacctgctctgtgcttggaggtgcccacttctcaacgtttgacgggaagcaatacacggtgcacggcgactgcagctatgtgctgaccaag

SEQ ID NO: 2297 - RNA, 70 nt, Homo sapiens
  source 1..70: mol_type = mRNA
gtggtggtgatcaaggccagtggggaagtgttcctgaaccagatctacacccagctgcccatctctgcag

SEQ ID NO: 2298 - RNA, 262 nt, Homo sapiens
  source 1..262: mol_type = mRNA
ccctgaacccggcgcacaatgggcgggtgtgcagcacctggggtgacttccactacaagaccttcgacggcgacgtcttccgcttccctggcctttgcaactacgtgttctctgagcactgccgcgccgcctacgaggacttcaacgtccagctacgccgaggcctagtgggctccaggcctgtggtcacccgtgttgtcatcaaggcccaggggctggtgctggaggcgtccaacggctccgtcctcatcaatgggcagcg

SEQ ID NO: 2299 - RNA, 115 nt, Homo sapiens
  source 1..115: mol_type = mRNA
ggaggagctgccttacagccgcactggcctcctggtggagcagagcggggactacatcaaggtcagcatccggctggtgctgacattcctgtggaacggagaggacagtgccctg

SEQ ID NO: 2300 - RNA, 91 nt, Homo sapiens
  source 1..91: mol_type = mRNA
ctggagctggatcccaaatacgccaaccagacctgtggcctgtgtggggacttcaacggcctcccggccttcaacgagttctatgcccaca

SEQ ID NO: 2301 - RNA, 107 nt, Homo sapiens
  source 1..107: mol_type = mRNA
acgccaggctgaccccgctccagtttgggaacctgcagaagttggatgggcccacggagcagtgcccggacccgctgcccttgccggccggcaactgcacggacgag

SEQ ID NO: 2302 - RNA, 202 nt, Homo sapiens
  source 1..202: mol_type = mRNA
gagggcatctgccaccgcaccctgctggggccggcctttgcggagtgccacgcactggtggacagcactgcgtacctggccgcctgcgcccaggacctgtgccgctgccccacctgcccgtgtgccacctttgtggaatactcacgccagtgcgcccacgcggggggccagccgcggaactggaggtgccctgagctctgcc

SEQ ID NO: 2303 - RNA, 118 nt, Homo sapiens
  source 1..118: mol_type = mRNA
gcacggtgctggatgacatcacgcactctggctgcctgcccctcgggcagtgcccctgcacccacggcggccgcacctacagcccgggcacctccttcaacaccacctgcagctcctg

SEQ ID NO: 2304 - RNA, 139 nt, Homo sapiens
  source 1..139: mol_type = mRNA
cacctgctccggggggctatggcagtgccaggacctgccgtgccctggcacctgctctgtgcagggcggggcccacatctccacctatgatgagaaactctacgacctgcatggtgactgcagctacgttctgtccaag

SEQ ID NO: 2305 - RNA, 70 nt, Homo sapiens
  source 1..70: mol_type = mRNA
gccatccgggtccaagcggacggcggcgtgttcctcaactccatctacacgcagctgcccctgtcggcag

SEQ ID NO: 2306 - RNA, 17447 nt, Homo sapiens
  source 1..17447: mol_type = mRNA
tcagaggctgctgagggacagggcactcttccccgccgtccacacaatgagtgttggccggaggaagctggccctgctctgggccctggctctcgctctggcctgcacccggcatacaggccatgcccaggatggctcctccgaatccagctacaagcaccaccctgccctctctcctatcgcccgggggcccagcggggtcccgctccgtggggcgactgtcttcccatctctgaggaccatccctgtggtacgagcctccaacccggcgcacaacgggcgggtgtgcagcacctggggcagcttccactacaagaccttcgacggcgacgtcttccgcttccccggcctctgcaactacgtgttctccgagcactgcggtgccgcctacgaggattttaacatccagctacgccgcagccaggagtcagcggcccccacgctgagcagggtcctcatgaaggtggatggcgtggtcatccagctgaccaagggctccgtcctggtcaacggccacccggtcctgctgcccttcagccagtctggggtcctcattcagcagagcagcagctacaccaaggtggaggccaggctgggccttgtcctcatgtggaaccacgatgacagcctgctgctggagctggacaccaaatacgccaacaagacctgtgggctctgtggggacttcaacgggatgcccgtggtcagcgagctcctctcccacaacaccaagctgacacccatggaattcgggaacctgcagaagatggacgaccccacggaccagtgtcaggaccctgtccctgaacccccgaggaactgctccactggctttggcatctgtgaggagctcctgcacggccagctgttctctggctgcgtggccctggtggacgtcggcagctacctggaggcttgcaggcaagacctctgcttctgtgaagacaccgacctgctcagctgcgtctgccacacccttgccgagtactcccggcagtgcacccatgcaggggggttgccccaggactggcggggccctgacttctgcccccagaagtgccccaacaacatgcagtaccacgagtgccgctccccctgcgcagacacctgctccaaccaggagcactcccgggcctgtgaggaccactgtgtggccggctgcttctgccctgaggggacggtgcttgacgacatcggccagaccggctgtgtccctgtgtcaaagtgtgcctgcgtctacaacggggctgcctatgccccaggggccacctactccacagactgcaccaactgcacctgctccggaggccggtggagctgccaggaggttccatgcccgggtacctgctctgtgcttggaggtgcccacttctcaacgtttgacgggaagcaatacacggtgcacggcgactgcagctatgtgctgaccaagccctgtgacagcagtgccttcactgtactggctgagctgcgcaggtgcgggctgacggacagcgagacctgcctgaagagcgtgacactgagcctggatggggcgcagacggtggtggtgatcaaggccagtggggaagtgttcctgaaccagatctacacccagctgcccatctctgcagccaacgtcaccatcttcagaccctcaaccttcttcatcatcgcccagaccagcctgggcctgcagctgaacctgcagctggtgcccaccatgcagctgttcatgcagctggcgcccaagctccgtgggcagacctgcggtctctgtgggaacttcaacagcatccaggccgatgacttccggaccctcagtggggtggtggaggccaccgctgcggccttcttcaacaccttcaagacccaggccgcctgccccaacatcaggaacagcttcgaggacccctgctctctgagcgtggagaatgagaagtatgctcagcactggtgctcgcagctgaccgatgccgacggccccttcggccggtgccatgctgccgtgaagccgggaacctactactcgaactgcatgtttgacacctgcaactgtgagcggagcgaggactgcctgtgcgccgcgctgtcctcctacgtgcacgcctgtgccgccaagggcgtgcagctcggcggctggagggacggcgtctgcacgaagcctatgaccacttgccccaagtcaatgacgtaccactaccatgtcagcacctgccagcccacctgccgctccctgagcgagggggacatcacctgcagtgttggcttcatccccgtggatggctgcatctgtcccaagggcaccttcctggacgacacgggcaagtgtgtgcaggccagcaactgtccctgctaccacagaggctccatgatccccaatggggagtcggtgcacgacagcggggctatctgcacctgcacacatgggaagctgagctgcatcggaggccaagcccccgccccagtgtgtgctgcgcccatggtgttctttgactgccgaaatgccacgcccggggacacaggggctggctgtcagaagagctgccacacactggacatgacctgttacagcccccagtgtgtgcctggctgcgtgtgccccgacgggctggtggcggacggcgagggcggctgcatcactgcggaggactgcccctgcgtgcacaatgaggccagctaccgggccggccagaccatccgggtgggctgcaacacctgcacctgtgacagcaggatgtggcggtgcacagatgacccctgcctggccacctgcgccgtgtacggggacggccactacctcaccttcgacggacagagctacagcttcaacggagactgcgagtacacgctggtgcagaaccactgtggcgggaaagacagcacccaggactcctttcgtgttgtcaccgagaacgtcccctgcggcaccacagggaccacctgctccaaggccatcaagattttcctggggggcttcgagctgaagctaagccatgggaaggtggaggtgatcgggacggacgagagccaggaggtgccatacaccatccggcagatgggcatctacctggtggtggacaccgacattggcctggtgctgctgtgggacaagaagaccagcatcttcatcaacctcagccccgagttcaagggcagggtctgcggcctgtgtgggaacttcgacgacatcgccgttaatgactttgccacgcggagccggtctgtggtgggggacgtgctggagtttgggaacagctggaagctctccccctcctgcccagatgccctggcgcccaaggacccctgcacggccaaccccttccgcaagtcctgggcccagaagcagtgcagcatcctccacggccccaccttcgccgcctgccacgcacacgtggagccggccaggtactacgaggcctgcgtgaacgacgcgtgcgcctgcgactccgggggtgactgcgagtgcttctgcacggctgtggccgcctacgcccaggcctgccatgaagtaggcctgtgtgtgtcctggcggaccccgagcatctgccctctgttctgcgactactacaaccccgaaggccagtgcgagtggcactaccagccctgcggggtgccctgcctgcgcacctgccggaacccccgtggagactgcctgcgggacgtccggggcctggaaggctgctaccccaagtgcccaccagaggctcccatctttgatgaggacaagatgcagtgtgtggccacctgcccaaccccgcctctgccaccacggtgccacgtccatgggaagtcctaccggccaggtgcagtggtgccctcggacaagaactgccagtcctgcctttgtacggagcgcggcgtggagtgcacctacaaagctgaggcctgtgtctgcacctacaatggacagcgcttccacccaggggacgtcatctaccacacgacggatggcacgggtggctgcatctccgcccgctgcggggccaacggcaccattgagaggagggtctacccctgcagccccaccacccctgtccccccaaccaccttctccttctccacacccccgcttgtcgtgagctccacgcacacccccagcaatggcccaagcagcgcgcacacaggccctccgagcagcgcctggcccaccacagcaggcacttctcccaggacgaggctgcccacagcctctgcctcactgccgccggtctgtggggaaaagtgcctgtggtcgccatggatggatgtcagccgccctggacggggcacggacagcggtgacttcgacacactggagaacctccgcgcccatgggtaccgggtgtgcgaatcacccaggtcggtggagtgccgagctgaggacgcccccggagtgccgctccgagccctggggcagcgtgtgcagtgcagcccggatgtggggctgacctgtcgtaacagggagcaggcatcggggctctgctacaactaccagatcagggtccagtgctgcacgcccctaccctgctccacctctagcagtccagcccagaccactcctccaactacctccaagaccactgaaacccgggcctcaggctcctcagctcccagcagcacacctggcaccgtgtctctctctacagccaggacgacacctgccccaggtaccgctacctctgtcaaaaaaactttctcaactcccagccctccgccagtgccggcaacatcaacatcatccatgtcgaccacggccccggggacctctgtggtctccagcaagcccacccccacggagcccagcacatcctcctgcctgcaggagctttgcacctggaccgagtggatcgatggcagctaccctgctcctggaataaatggtggagattttgacacatttcaaaatttgagagacgaaggatacacattctgtgaaagtcctcgaagcgtgcagtgccgggcagagagcttccccaacacgccgctggcagacctggggcaggacgtcatctgcagccacacagaggggctgatttgcctgaacaagaaccagctcccacccatctgctacaactatgagatccgcatccagtgttgcgagacggtgaacgtgtgcagagacatcaccagactgccaaagaccgtcgcaacgacacggccgactccacatccaaccggagctcagacccagaccaccttcaccacacacatgccctcggcctccacagagcaacccacggcaacctccaggggtgggcccacagcaaccagcgtcacacagggcacccacaccacactagtcaccagaaactgtcatccccggtgcacctggacaaagtggttcgacgtggacttcccgtcccccggaccccatggtggagacaaggaaacctacaacaacatcatcaggagtggggaaaaaatctgccgccgacctgaggagatcaccaggctccagtgccgagccaagagccacccagaggtgagcatcgaacacctgggccaggtggtgcagtgcagccgggaagagggcctggtgtgccggaaccaggaccagcagggacccttcaagatgtgcctcaactacgaggtgcgtgtgctctgctgcgagacccccagaggctgccacatgacctccacacctggctccacctctagcagtccagcccagaccactccttcaacaacctccaagaccactgaaacccaggcctcaggctcctcagcccccagcagcacacctggcaccgtgtctctctctacagccaggacgacacctgccccaggtaccgctacctctgtcaaaaaaactttctcaactcccagccctccgccagtgccggcaacatcaacatcatccatgtcgaccacggccccggggacctctgtggtctccagcaagcccacccccacggagcccagcacatcctcctgcctgcaggagctttgcacctggaccgagtggattgatggcagctaccctgctcctggaataaatggtggagattttgacacatttcaaaatttgagagacgaaggatacacattctgtgaaagtcctcgaagcgtgcagtgccgggcagagagcttccccaacacgccgctggcagacctggggcaggacgtcatctgcagccacacagaggggctgatttgcctgaacaagaaccagctcccacccatctgctacaactatgagatccgcatccagtgttgcgagacggtgaacgtgtgcagagacatcaccagaccgccaaagaccgtcgcaacgacacggccgactccacatccaaccggagctcagacccagaccaccttcaccacacacatgccctcggcctccacagagcaacccacggcaacctccaggggtgggcccacagcaaccagcgtcacacagggcacccacaccacaccagtcaccagaaactgtcatccccggtgcacctggacaacgtggttcgacgtggacttcccgtcccccggaccccatggtggagacaaggaaacctacaacaacatcatcaggagtggggaaaaaatctgccgccgacctgaggagatcaccaggctccagtgccgagccaagagccacccagaggtgagcatcgaacacctgggccaggtggtgcagtgcagccgggaagagggcctggtgtgccggaaccaggaccagcagggacccttcaagatgtgcctcaactacgaggtgcgtgtgctctgctgcgagacccccaaaggctgccccgtgacctccacacctgtgacagctcctagcacccctagtgggagagccaccagcccaactcagagcacctcctcttggcagaaatccaggacaaccactttggtgacaaccagcacaacctccactccacagaccagtacaacctatgcccatacaaccagcacaacctctgctcctacagccagaacaacctctgctcctacaaccagaacaacctctgcctctccagccagcacaacctctggtcctggaaatactcccagccctgttcctaccaccagcacaatctctgctcctacaactagcataacctctgcccctacaaccagcacaacctctgcccctacaagcagcacaacctctggtcctggaactactcccagccctgttcctaccaccagcataacctctgcccctacaaccagcacaacctctgctcctacaaccagcacaacctctgcccgtacaagcagcacaacctctgccactaccaccagcagaatctctggtcctgaaactactcccagccctgttcctaccaccagcacaacctctgccactacaaccagcacaacctcagctcctacaaccagcacaacctctgcccctacaagcagcacaacctccagtccacagaccagcacaacctcggctcctacaaccagcacaacttctggtcctggaactaccccaagccctgttcccacgaccagcacaacctctgcccctacaacaagaacaacttctgctcctaaaagcagcacaacctctgccgctacaaccagcacaacctctggtcctgaaactactcctagacctgttcctaccaccagcacaacctcttctcctacaaccagcacaacctctgctcctacaaccagcacaacctctgcttctacaaccagcacaacctctggtgctggaactactcccagccctgttcccaccaccagcacaacctctgctcctacaaccagcacaacctctgcccctataagcagcacaacctctgccactacaaccagcacaacctctggtcctggaactactcccagccctgttcctaccacgagcacaacctctgctcctacaaccagcacaacctctggtcctggaactactcccagtgctgttcccaccaccagcataacctctgcacctacaaccagcacaaactctgcccctataagcagcacaacctctgccactacaaccagcagaatctctggtcctgaaactactcccagccctgttcctaccgccagcacaacctctgcttctacaactagcacaacctctggtcctggaactactcccagccctgttcctaccaccagcacaatctctgttcctaccaccagcacaacttctgcttctacaaccagcacaacctctgcttctacaaccagcacaacctctggtcctggaactactcccagccctgttcccaccaccagcacaacctctgctcccacaacaagcacaacctctgcccctacaaccagcacaatctcggccccaacaaccagcacaacctctgccactacaaccagcacgacctctgctcctacacccagaagaacctcagcccctacaaccagcacaatctctgcctctaccaccagcacaacctctgcgactacaaccagcacaacctctgctactacaaccagcacaatctctgcccctacaaccagcacaactttgtctcctacaaccagcacaacctctactactataaccagcacaacttctgcccctataagcagcacaacttccacaccacagaccagcacaacttcggctcctacaaccagcacaacttctggtcctggaactacttcaagccctgttcccaccaccagcacaacctctgcccctacaaccagcacaacctctgcccctacaaccagaacaacctctgtccctacaagcagcacaacctccactgctacaaccagcacaacctctggccctggaactactcccagccctgttcccaccaccagtacaacctctgctcctacaaccagaacaacctctgctcctacaaccagcacaacctctgcccctacaaccagcacaacctctgcccctacaagcagcacaacctcagctactacaaccagcacaatctctgttcctacaaccagcacaacttctgttcctggaactactcccagccctgttcctaccaccagcacaatctctgttcctaccaccagcacaacttctgcttctacaaccagcacaacctctggtcctggaactactcccagccctgttcccaccaccagcacaacctctgctcccacaacaagcacaacctctgcccctacaaccagcacaatctcggccccaacaaccagcacaccctctgcccctacaaccagcacaaccttagctcctacaaccagcacaacctctgcccctacaaccagcacaacctctacccctacaagcagcacaacctcctctccacagaccagcacaacctcggcttctaccaccagcataacttctggtcctggaactaccccaagccctgttcccaccaccagcacaacctctgctcctacaaccagcacaacctctgccgctacaaccagcacaatctcggccccaacaaccagcacaacgtctgctcctacaaccagcacaacctctgcctctacagccagcaaaacctctggtcttggaactactcccagccctattcctaccaccagcacaacctctcctcctacaaccagcacaacttctgcctctacagccagcaaaacctctggtcctggaaccactcccagccctgttcccaccaccagcacaatctttgctcctagaaccagcaccacttctgcctctacaaccagcacaacccctggtcctggaaccactcccagccccgttcccaccaccagcacagcctctgtttcaaagaccagcacaagccatgtttccatatccaagacaacccactcccaaccagtcaccagagactgtcatctccggtgcacctggaccaagtggtttgacatagacttcccatcccctggaccccacggcggggacaaggaaacctacaacaacatcatcaggagtggggaaaaaatctgccgccgacctgaggagatcaccaggctccagtgccgagccgagagccacccggaggtgagcattgaacacctgggccaggtggtgcagtgcagccgtgaagagggcctggtgtgccggaaccaggaccagcagggacccttcaagatgtgcctcaactacgaggtgcgtgtgctctgctgcgagacccctaaaggttgccccgtgacctccacacctgtgacagctcctagcacccctagtgggagagccaccagcccaactcagagcacttcctcttggcagaaatccaggacaaccactttggtgacaaccagcacaacctccactccacagaccagcacaacctctgctcctacaaccagcacaacctctgctcccacaaccagcacaacttctgcccctacaaccagcacaacctccactccacagaccagcatatcctctgcccctacaagcagcacaacctcggctcctacaagcagcacaatctctgctcgtacaaccagcataatctctgcccctacaaccagcacaacctcttcccctacaaccagcacaacctctgctactacaaccagcacaacctctgcccctacaagcagcacaacctccactccacagaccagcaaaacctcagctgctacaagcagcacaacctccggttctggaactactcccagccctgttaccaccaccagcacagcctctgtttcaaagaccagcacaagccatgtttctgtatccaagacaacccactcccaaccagtcaccagagactgtcatccccggtgcacctggaccaaatggtttgatgtggactttccatcccctggaccccacggtggggacaaggaaacctacaacaacatcatcaggagtggggaaaaaatctgccgccgacctgaggagatcaccaggctccagtgccgagccaagagccacccggaggtgagcatcgaacacctgggccaggtggtgcagtgcagccgcgaagagggcctggtgtgccggaaccaggaccagcagggacccttcaagatgtgcctcaactacgaggtgcgtgtgctttgctgcgagacccccaaaggctgccccgtgacctccacatctgtgacagctcctagcacccctagtgggagagccaccagcccaactcagagcacctcctcttggcagaaatccaggacaaccactttggtgacaagcagcataacctccactacacagaccagcacaacctctgcccctacaactagcacaacccctgcttctatacccagcacaacctctgccccaacaaccagcacaacctctgctcccacaacgagcacaacttctgcccctacaaccagcacaacctccactccacagaccaccacatcctctgcccctacaagcagcacaacctcggctcctaccaccagcacaatctctgcccctacaaccagcacaatctctgcccctacaaccagcacaacctctgctcccacagccagcacaacgtcagctcctacgagcacttcctcggctcctacaaccaacacaacctctgcccctacaactagcactacctctgctcccataaccagcacaatctctgcccctacaaccagcacaacctccactccacagaccagcacaatctcttcccctacaaccagcacaacctccactccgcagaccagcacaacctcttcccctacaactagcacaacctcagctcctacaaccagcacaacttctgcccctacaaccagcacaacctccactccacagaccagcatatcctctgcccctacaagcagcacaacctctgctcctacagccagcacaatctctgcccctacaaccagcacaacctctttccatacaaccagcacaacctctccccctacaagcagcacaagctccactccacagaccagcaaaacctcagctgctacaagcagcacaacctccggttctggaactactcccagccccgttcccaccaccagcacagcctctgtttcaaagaccagcacaagccatgtttctgtatccaagacaacccactcccaaccagtcaccagagactgtcatccccggtgcacctggaccaagtggtttgacgtggactttccatcccctggaccccacggtggggacaaggaaacctacaacaacatcatcaggagtggggaaaaaatctgccgccgacctgaggagatcaccaggctccagtgccgagccgagagccacccggaggtgagcatcgaacacctgggccaggtggtgcagtgcagccgggaagagggcctggtgtgccggaaccaggaccagcagggacccttcaagatgtgcctcaactacgaggtgcgtgtgctctgctgcgagacccccaaaggctgccccgtgacctccacacctgtgacagctcctagcacccctagtgggagagccaccagcccaactcagagcacttcctcttggcagaaatccaggacaaccactttggtgacaaccagcacaacctccactccacagaccagcacaacctctgcccctacaaccagcacaatccctgcttctacacccagcacaacctctgcccctacaaccagcacaacctctgcccctacaaccagcacgacctcagctcctacacacagaacgacttctggtcctacaaccagcacaaccttggctcctacaaccagcacaacctctgctccaacaaccagcacaaactctgctcctacaaccagcacaatctctgcctctacaaccagcacaatctctgcccctacaaccagcacaatctcttcccctacaagcagcacaacctccactccacagaccagcaaaacctcagctgctacaagcagcacaacctccggttctggaactactccaagccctgttcccaccaccagcacaacctctgcctctacaaccagcacaacttctgctcctacaaccagcacaacctctggtcctggaactactccaagccctgttcccagcaccagtacaacctctgctgctacaaccagcacaacctctgctcctacaaccagaacaacatctgctcctacaagcagcatgacctctggtcctggaactactcccagccctgttcccaccaccagcacaacctctgctcctacaactagcacaacctctggtcctggaactactcccagccctgttcccaccaccagcacaacctctgctcctataaccagcacaacctctggtcctggaagtactcccagccctgttcccaccaccagcacaacctctgctcctacaaccagcacaacctctgcctctacagccagcacaacctctggtcctggaactactcccagccctgttcccaccaccagcacaacctctgctcctacaaccagaacaacctctgcctctacagccagcacaacctctggtcctggaagtactcccagccctgttcccaccaccagcacaacctctgctcctacaaccagaacaacccctgcctctacagccagcacaacctctggtcctggaactactcccagccctgttcccaccacaagcacaacctctgcttctacaaccagcacaatctctctccctacaaccagcacaacctctgctcctataaccagcatgacctctggtcctggaactactcccagccctgttcccaccaccagcacaacctctgctcctacaaccagcacaacctctgcctctacagccagcacaacctctggtcctggaactactcccagccctgttcccaccaccagcacaacctctgctcctacaaccagcacaacctctgcctctacagccagcacaacctctggtcctggaacttctctcagccctgttcccaccacgagcacaacctctgctcctacaactagcacaacctctggtcctggaactactcccagccctgttcccaccaccagcacaacctctgctcctacaaccagcacgacctctggtcctggaactactcccagccccgttcccaccaccagcacaacccctgtttcaaagaccagcacaagccatctttctgtatccaagacaacccactcccaaccagtcaccagtgactgtcatcctctgtgcgcctggacaaagtggttcgacgtggacttcccatcccctggaccccacggcggggacaaggaaacctacaacaacatcatcaggagtggggaaaaaatctgccgccgacctgaggagatcaccaggctccagtgccgagccgagagccacccggaggtgaacattgaacacctgggtcaggtggtgcagtgcagccgtgaagagggcctggtgtgccggaaccaggaccagcagggacccttcaagatgtgcctcaactacgaggtgcgcgtgctctgctgcgagacccccagaggctgcccggtgacctctgtgaccccatatgggacttctcctaccaatgctctgtatccttccctgtctacttccatggtatccgcctccgtggcatccacctctgtggcatccagctctgtggcatccagctctgtggcttactccacccaaacctgcttctgcaacgtggctgaccggctctaccctgcaggatccaccatataccgccacagagacctcgctggccattgctattatgccctgtgtagccaggactgccaagtggtcagaggggttgacagtgactgtccgtccaccacgctgcctcctgccccagccacgtccccttcaatatccacctccgagcccgtcactgagctgggatgcccaaatgcggttccccccagaaagaaaggtgagacctgggccacacccaactgctccgaggccacctgtgagggcaacaacgtcatctccctgcgcccgcgcacgtgcccgagggtggagaagcccacttgtgccaacggctacccggctgtgaaggtggctgaccaagatggctgctgccatcactaccagtgccagtgtgtgtgcagcggctggggtgacccccactacatcaccttcgacggcacctactacaccttcctggacaactgcacgtacgtgctggtgcagcagattgtgcccgtgtatggccacttccgcgtgctcgtcgacaactacttctgcggtgcggaggacgggctctcctgcccgaggtccatcatcctggagtaccaccaggaccgcgtggtgctgacccgcaagccagtccacggggtgatgacaaacgagatcatcttcaacaacaaggtggtcagccccggcttccggaaaaacggcatcgtggtctcgcgcatcggcgtcaagatgtacgcgaccatcccggagctgggagtccaggtcatgttctccggcctcatcttctccgtggaggtgcccttcagcaagtttgccaacaacaccgagggccagtgcggcacttgcaccaacgacaggaaggatgagtgccgcacgcctagggggacggtggtcgcttcctgctccgagatgtccggcctctggaacgtgagcatacccgaccagccagcctgccaccggcctcacccgacgcccaccacggtcgggcccaccacagttgggtctaccacggtcgggcccaccacagttgggtctaccacggtcgggcccaccacaccgcctgctccgtgcctgccatcacccatctgccagctgattctgagcaaggtctttgagccgtgccacactgtgatccccccactgctgttctatgagggctgcgtctttgaccggtgccacatgacggacctggatgtggtgtgctccagcctggagctgtacgcggcactctgtgcgtcccacgacatctgcatcgattggagaggccggaccggccacatgtgcccattcacctgcccagccgacaaggtgtaccagccctgcggcccgagcaacccctcctactgctacgggaatgacagcgccagcctcggggctctgccggaggccggccccatcaccgaaggctgcttctgtccggagggcatgaccctcttcagcaccagtgcccaagtctgcgtgcccacgggctgccccaggtgtctggggccccacggagagccggtgaaggtgggccacaccgtcggcatggactgccaggagtgcacgtgtgaggcggccacgtggacgctgacctgccgacccaagctctgcccgctgccccctgcctgccccctgcccggcttcgtgcctgtgcctgcagccccacaggccggccagtgctgcccccagtacagctgcgcctgcaacaccagccgctgccccgcgcccgtgggctgtcctgagggcgcccgcgcgatcccgacctaccaggagggggcctgctgcccagtccaaaactgcagctggacagtgtgcagcatcaacgggaccctgtaccagcccggcgccgtggtctcctcgagcctgtgcgaaacctgcaggtgtgagctgccgggtggccccccatcggacgcgtttgtggtcagctgtgagacccagatctgcaacacacactgccctgtgggcttcgagtaccaggagcagagcgggcagtgctgtggcacctgtgtgcaggtcgcctgtgtcaccaacaccagcaagagccccgcccacctcttctaccccggcgagacctggtcagacgcagggaaccactgtgtgacccaccagtgtgagaagcaccaggatgggctcgtggtggtcaccacgaagaaggcgtgccccccgctcagctgttctctggacgaggcccgcatgagcaaggacggctgctgccgcttctgcccgccgcccccgcccccgtaccagaaccagtcgacctgtgctgtgtaccataggagcctgatcatccagcagcagggctgcagctcctcggagcccgtgcgcctggcttactgccgggggaactgtggggacagctcttccatgtactcgctcgagggcaacacggtggagcacaggtgccagtgctgccaggagctgcggacctcgctgaggaatgtgaccctgcactgcaccgacggctccagccgggccttcagctacaccgaggtggaagagtgcggctgcatgggccggcggtgccctgcgccgggcgacacccagcactcggaggaggcggaacccgagcccagccaggaggcagagagtgggagctgggagagaggcgtcccagtgtcccccatgcactgaccagcactgccgccctcctgacctccaaggagaacctcccatatgtcctctgagctcggcttccaaggccagtggaacttgtgcccctgtccaggcggctgcagctttgaacacactgtccacgcccgctttcttgtggagggtgtgggctatgggtcacctgctgcctggaggaggggcccttacccaccccgcctgcagccacctctcaggaccagccccggggctggccgagctcctctggccatgcatccagcctgctgttctggggacgtgagcatcacctgagggtctcaggaatgacgcttggacatggtgatcagctgcctggtggctgcaggaggaagaacctcactcctacctcagccctcagcctgcgctcccctcctcagtacacggccaatctgttgcataaatacacttgagcattttgcaa

SEQ ID NO: 2307 - RNA, 17911 nt, Homo sapiens
  source 1..17911: mol_type = mRNA
acccggcccggctccctccctgcccgtccccgtccccccacccgtgccagcccccaggatgggtgccccgagcgcgtgccggacgctggtgttggctctggcggccatgctcgtggtgccgcaggcagagacccagggccctgtggagccgagctgggagaatgcagggcacaccatggatggcggtgccccgacgtcctcgcccacccggcgcgtgagctttgttccacccgtcactgtcttccccagcctgagccccctgaacccggcgcacaatgggcgggtgtgcagcacctggggtgacttccactacaagaccttcgacggcgacgtcttccgcttccctggcctttgcaactacgtgttctctgagcactgccgcgccgcctacgaggacttcaacgtccagctacgccgaggcctagtgggctccaggcctgtggtcacccgtgttgtcatcaaggcccaggggctggtgctggaggcgtccaacggctccgtcctcatcaatgggcagcgggaggagctgccttacagccgcactggcctcctggtggagcagagcggggactacatcaaggtcagcatccggctggtgctgacattcctgtggaacggagaggacagtgccctgctggagctggatcccaaatacgccaaccagacctgtggcctgtgtggggacttcaacggcctcccggccttcaacgagttctatgcccacaacgccaggctgaccccgctccagtttgggaacctgcagaagttggatgggcccacggagcagtgcccggacccgctgcccttgccggccggcaactgcacggacgaggagggcatctgccaccgcaccctgctggggccggcctttgcggagtgccacgcactggtggacagcactgcgtacctggccgcctgcgcccaggacctgtgccgctgccccacctgcccgtgtgccacctttgtggaatactcacgccagtgcgcccacgcggggggccagccgcggaactggaggtgccctgagctctgcccccggacctgccccctcaacatgcagcaccaggagtgtggctcaccctgcacggacacctgctccaacccccagcgcgcgcagctctgcgaggaccactgtgtggacggctgcttctgccccccaggcacggtgctggatgacatcacgcactctggctgcctgcccctcgggcagtgcccctgcacccacggcggccgcacctacagcccgggcacctccttcaacaccacctgcagctcctgcacctgctccggggggctatggcagtgccaggacctgccgtgccctggcacctgctctgtgcagggcggggcccacatctccacctatgatgagaaactctacgacctgcatggtgactgcagctacgttctgtccaagaaatgtgccgacagcagcttcaccgtgctggctgagctgcggaagtgcggcctgacggacaacgagaactgcctgaaagcggtgacgctcagcctggacggcggggacacggccatccgggtccaagcggacggcggcgtgttcctcaactccatctacacgcagctgcccctgtcggcagccaacatcaccctgttcacaccctcgagcttcttcatcgtggtgcagacaggcctggggctgcagctgctggtgcagctggtgccactcatgcaggtgtttgtcaggctggaccccgcccaccagggccagatgtgcggcctgtgtgggaacttcaaccagaaccaggctgacgacttcacggccctcagcggggtggtggaggccacgggcgcagccttcgccaacacctggaaggcccaggctgcctgtgccaatgccaggaacagctttgaggacccctgctccctcagtgtggagaatgagaactacgcccggcactggtgctcgcgcctgaccgatcccaacagtgccttctcgcgctgccactccatcatcaaccccaagcccttccactcgaactgcatgtttgacacctgcaactgtgagcggagcgaggactgcctgtgcgccgcgctgtcctcctatgtgcacgcctgtgccgccaagggcgtacagctcagcgactggagggacggcgtctgcaccaagtacatgcagaactgccccaagtcccagcgctacgcctacgtggtggatgcctgccagcccacttgccgcggcctgagtgaggccgacgtcacctgcagcgtttccttcgtgcctgtggacggctgcacctgccccgcgggcaccttcctcaatgacgcgggcgcctgtgtgcccgcccaggagtgcccctgctacgctcacggcaccgtgctggctcctggagaggtggtgcacgacgagggcgccgtgtgttcatgtacgggtgggaagctaagctgcctgggagcctctctgcagaaaagcacagggtgtgcagcccccatggtgtacctggactgcagcaacagctcggcgggcacccctggggccgagtgcctccggagctgccacacgctggacgtgggctgtttcagcacacactgcgtgtccggctgtgtctgtcccccggggctggtgtcggatgggagtgggggctgcattgccgaggaggactgcccctgtgtgcacaacgaggccacctacaagcctggagagaccatcagggtcgactgcaacacctgcacctgcaggaaccggaggtgggagtgcagccaccggctctgcctgggcacctgcgtggcctacggggatggccacttcatcacctttgatggcgatcgctacagctttgaaggcagctgcgagtacatcttggcccaggactactgtggggacaacaccacccacgggaccttccgcatcgtcaccgagaacatcccctgtgggaccaccggcaccacctgctccaaggccatcaagctcttcgtggagagctacgagctgatcctccaagaggggacctttaaggcggtggcgagagggccgggtggggacccaccctacaagatacgctacatggggatcttcctggtcatcgagacccacgggatggccgtgtcctgggaccggaagaccagcgtgttcatccgactgcaccaggactacaagggcagggtctgcggcctgtgcgggaacttcgacgacaatgccatcaatgactttgccacgcgtagccggtccgtggtgggggacgcactggagtttgggaacagctggaagctctccccctcctgcccggacgccctggcacccaaggacccctgcacggccaaccccttccgcaagtcctgggcccagaagcagtgcagcatcctccacggccccaccttcgccgcctgccgctcccaggttgactccaccaagtactacgaggcctgcgtgaacgacgcgtgtgcctgcgactcgggtggcgactgcgagtgtttctgcacggctgtggctgcctacgcccaggcctgccacgacgcgggcctgtgtgtgtcctggcggactccggacacctgccccttgttctgtgacttctacaacccacatgggggctgtgagtggcactaccagccctgcggggcaccctgcctaaaaacctgccggaaccccagtgggcactgcctggtggacctgcctggcctggaaggctgctacccgaagtgcccacccagccagcccttcttcaatgaggaccagatgaagtgcgtggcccagtgtggctgctacgacaaggacggaaactactatgacgtcggtgcaagggtccccacagcggagaactgccagagctgtaactgcacacccagtggcatccagtgcgctcacagccttgaggcctgcacctgcacctatgaggacaggacctacagctaccaggacgtcatctacaacaccaccgatgggcttggcgcctgcttgatcgccatctgcggaagcaacggcaccatcatcaggaaggctgtggcatgtcctggaactccagccacaacgccattcaccttcaccaccgcctgggtcccccactccacgacaagcccggccctcccggtctccaccgtgtgtgtccgcgaggtctgccgctggtccagctggtacaatgggcaccgcccagagcccggcctgggaggcggagactttgagacgtttgaaaacctgaggcagagagggtaccaggtatgccctgtgctggctgacatcgagtgccgggcggcgcagcttcccgacatgccgctggaggagctgggccagcaggtggactgtgaccgcatgcgggggctgatgtgcgccaacagccaacagagtcccccgctctgtcacgactacgagctgcgggttctctgctgcgaatacgtgccctgtggcccctccccggccccaggcaccagccctcagccctccctcagtgccagcacggagcctgctgtgcctaccccaacccagaccacagcaaccgaaaagaccaccctatgggtgaccccgagcatccggtcgacggcggccctcacctcgcagactgggtccagctcaggccccgtgacggtcaccccctcggccccaggtaccaccacctgccagccccggtgtcagtggacagagtggtttgatgaggactaccccaagtctgaacaacttggaggggacgttgagtcctacgataagatcagggccgctggagggcacttatgccagcagcctaaggacatagagtgccaggccgagagcttccccaactggaccctggcacaggtggggcagaaggtgcactgtgacgtccacttcggcctggtgtgcaggaactgggagcaggagggcgtcttcaagatgtgctacaactacaggatccgggtcctctgctgcagtgacgaccactgcaggggacgtgccacaaccccgccaccgaccacagagctggagacggccaccaccaccaccacccaggccctgttctcaacgccgcagcctacgagtagcccggggctgaccagggctcccccggccagcaccacagcagtccccaccctctcagaaggactgacatcccccagatacacaagcacccttggtacagccaccacgggaggccccacgacgcctgcaggctccacagaacccactgtcccaggggtggccacatccacccttccaacacgctcagcccttccagggacgacggggagcttgggcacatggcgcccctcacagccacccacgctggccccaacaacaatggcaacctccagagctcgcccgacaggcacagccagcaccgcttccaaagagccgctgaccacgagcctggcgccaacactcacgagcgagctgtccacctctcaggccgagaccagcacgcccaggacagagacgacaatgagccccttgactaacaccaccaccagccagggcacgacccgctgtcaaccgaagtgtgagtggacagagtggtttgacgtggacttcccaacctcaggggttgcaggcggggacatggaaacttttgaaaacatcagggctgctgggggcaagatgtgctgggcaccaaagagcatagagtgccgggcggagaactaccccgaggtaagcatcgaccaggtcgggcaggtgctgacctgcagcctggagacggggctgacctgcaagaacgaagaccagacaggcaggttcaacatgtgcttcaactacaacgtgcgtgtgctttgctgtgacgactacagccactgccccagtaccccagccaccagctccacggccacgccctcctcaactccggggacgacctggatcctcacaaagccgaccacaacagccactacgactgcgtccactggatccacggccaccccgacctccaccctgagaacagctccccctcccaaagtgctgaccaccacggccaccacacccacagtcaccagctccaaagccactccctcctccagtccagggactgcaaccgcccttccagcactgagaagcacagccaccacacccacagctaccagcgttacacccatcccctcttcctccctgggcaccacctggacccgcctatcacagaccaccacacccacggccaccatgtccacagccacaccctcctccactccagagactgcccacacctccacagtgcttaccgccacggccaccacaactggggccaccggctctgtggccaccccctcctccaccccaggaacagctcacactaccaaagtgccaactaccacaaccacgggcttcacagccaccccctcctccagcccagggacggcactcacgcctccagtgtggatcagcacaaccaccacacccacaaccagaggctccacggtgaccccctcctccatcccggggaccacccacaccgccacagtgctgaccaccaccaccacaactgtggccactggttctatggcaacaccctcctctagcacacagaccagtggtactcccccatcactgaccaccacggccactacgatcacggccaccggctccaccaccaacccctcctcaactcctgggacaactcccatccccccagtgctgaccaccaccgccaccacacctgcagccaccagcaacacagtgactccctcctctgccctagggaccacccacacacccccagtgccgaacaccatggccaccacacacgggcgatccctgccccccagcagtccccacacggtgcgcacagcctggacttcggccacctcgggcatcttgggcaccacccacatcacagagccttccacggtgacttcccacaccctagcagcaaccaccggtaccacccagcactcgactccagccctttccagccctcaccctagcagcagaaccaccgagtcacccccttctccagggacgaccaccccgggccacaccacggccacctccaggaccacagccacggccacacccagcaagacccgcacctcgaccctgctgcccagcagccccacatcggcccccataaccacggtggtgaccatgggctgtgagccccagtgtgcctggtcagagtggctggactacagctaccccatgccggggccctctggcggggactttgacacctactccaacatccgtgcggccggaggggccgtctgtgagcagcccctgggcctcgagtgccgtgcccaggcccagcctggtgtccccctgcgggagttgggccaggtcgtggaatgcagcctggactttggcctggtctgcaggaaccgtgagcaggtggggaagttcaagatgtgcttcaactatgaaatccgtgtgttctgctgcaactacggccactgccccagcaccccggccaccagctctacggccatgccctcctccactccggggacgacctggatcctcacagagctgaccacaacagccactacgactgagtccactggatccacggccaccccgtcctccaccccagggaccacctggatcctcacagagccgagcactacagccaccgtgacggtgcccaccggatccacggccaccgcctcctccacccaggcaactgctggcaccccacatgtgagcaccacggccacgacacccacagtcaccagctccaaagccactcccttctccagtccagggactgcaaccgcccttccagcactgagaagcacagccaccacacccacagctaccagctttacagccatcccctcctcctccctgggcaccacctggacccgcctatcacagaccaccacacccacggccaccatgtccacagccacaccctcctccactccagagactgtccacacctccacagtgcttaccaccacggccaccacaaccggggccaccggctctgtggccaccccctcctccaccccaggaacagctcacactaccaaagtgctgactaccacaaccacgggcttcacagccaccccctcctccagcccagggacggcacgcacgcttccagtgtggatcagcacaaccaccacacccacaaccagaggttccacggtgaccccctcctccatcccggggaccacccacacccccacagtgctgaccaccaccaccacaactgtggccactggttctatggcaacaccctcctctagcacacagaccagtggtactcccccatcactgaccaccacggccactacgatcacggccaccggctccaccaccaacccctcctcaactccagggacaacacctatccccccagtgctgaccaccaccgccaccacacctgcagccaccagcagcacagtgactccctcctctgccctagggaccacccacacacccccagtgccgaacaccacggccaccacacacgggcgatccctgtcccccagcagtccccacacggtgcgcacagcctggacttcggccacctcaggcaccttgggcaccacccacatcacagagccttccacggggacttcccacaccccagcagcaaccaccggtaccacccagcactcgactccagccctgtccagccctcaccctagcagcaggaccaccgagtcacccccttctccagggacgaccaccccgggccacaccagggccacctccaggaccacggccacggccacacccagcaagacccgcacctcgaccctgctgcccagcagccccacatcggccccaataaccacggtggtgaccatgggctgtgagccccagtgtgcctggtcagagtggctggactacagctaccccatgccggggccctctggcggggactttgacacctactccaacatccgtgcggccggaggggccgtctgtgagcagcccctgggcctcgagtgccgtgcccaggcccagcctggtgtccccctgcgggagttgggccaggtcgtggaatgcagcctggactttggcctggtctgcaggaaccgtgagcaggtggggaagttcaagatgtgcttcaactatgaaatccgtgtgttctgctgcaactacggccactgccccagcaccccggccaccagctctacggccacgccctcctccactccagggacgacctggatcctcacagagcagaccacagcagccactacgaccgcaaccactggatccacggccatcccgtcctccaccccgggaacagctccccctcccaaagtgctgaccagcacggccaccacacccacagccaccagttccaaagccacttcctcctccagtccaaggactgcaaccacccttccagtgctgacaagcacagccaccaaatccacagctaccagctttacacccatcccctccttcacccttgggaccaccgggaccctcccagaacagaccaccacacccatggccaccatgtccacaatccacccctcctccactccggagaccacccacacctccacagtgctgaccacgaaggccaccacgacaagggccaccagttccatgtccaccccctcctccactccggggacgacctggatcctcacagagctgaccacagcagccactacaactgcagccactggccccacggccaccccgtcctccaccccagggaccacctggatcctcacagagcccagcactacagccaccgtgacggtgcccaccggatccacggccaccgcctcctccacccgggcaactgctggcaccctcaaagtgctgaccagcacggccaccacacccacagtcatcagctccagagccactccctcctccagtccagggactgcaaccgcccttccagcactgagaagcacagccaccacacccacagctaccagcgttacagccatcccctcttcctccctgggcaccgcctggacccgcctatcacagaccaccacacccacggccaccatgtccacagccacaccctcctctactccagagactgtccacacctccacagtgcttaccaccacgaccaccacaaccagggccaccggctctgtggccaccccctcctccaccccaggaacagctcacactaccaaagtgccgactaccacaaccacgggcttcacagccaccccctcctccagcccagggacggcactcacgcctccagtgtggatcagcacaaccaccacacccacaaccagaggctccacggtgaccccctcctccatcccggggaccacccacaccgccacagtgctgaccaccaccaccacaactgtggccactggttctatggcaacaccctcctctagcacacagaccagtggtactcccccatcactgaccaccacggccactacgatcacagccaccggctccaccaccaacccctcctcaactccagggacaactcccatccccccagtgctgaccaccaccgccaccacacctgcagccaccagcagcacagtgactccctcctctgccctagggaccacccacacacccccagtgccgaacaccacggccaccacacacgggcggtccctgccccccagcagtccccacacggtgcgcacagcctggacttcggccacctcgggcatcttgggcaccacccacatcacagagccttccacggtgacttcccacaccccagcagcaaccaccagtaccacccagcactcgactccagccctgtccagccctcaccctagcagcaggaccaccgagtcacccccttctccagggacgaccaccccgggccacaccaggggcacctccaggaccacagccacagccacacccagcaagacccgcacctcgaccctgctgcccagcagccccacatcggcccccataaccacggtggtgaccacgggctgtgagccccagtgtgcctggtcagagtggctggactacagctaccccatgccggggccctctggcggggactttgacacctactccaacatccgtgcggccggaggggcagtctgtgagcagcccctgggcctcgagtgccgtgcccaggcccagcctggtgtccccctgcgggagttgggccaggtcgtggaatgcagcctggactttggcctggtctgcaggaaccgtgagcaggtggggaagttcaagatgtgcttcaactatgaaatccgtgtgttctgctgcaactacggccactgccccagcaccccggccaccagctctacggccacgccctcctcaactccggggacgacctggatcctcacaaagctgaccacaacagccactacgactgagtccactggatccacggccaccccgtcctccaccccagggaccacctggatcctcacagagccgagcactacagccaccgtgacggtgcccaccggatccacggccaccgcctcctccacccaggcaactgctggcaccccacatgtgagcaccacggccacgacacccacagtcaccagctccaaagccactcccttctccagtccagggactgcaaccgcccttccagcactgagaagcacagccaccacacccacagctaccagctttacagccatcccctcctcctccctgggcaccacctggacccgcctatcacagaccaccacacccacggccaccatgtccacagccacaccctcctccactccagagactgcccacacctccacagtgcttaccaccacggccaccacaaccagggccaccggctctgtggccaccccctcttccaccccaggaacagctcacactaccaaagtgccgactaccacaaccacgggcttcacagtcaccccctcctccagcccagggacggcacgcacgcctccagtgtggatcagcacaaccaccacacccacaaccagtggctccacggtgaccccctcctccgtcccggggaccacccacacccccacagtgctgaccaccaccaccacaactgtggccactggttctatggcaacaccctcctctagcacacagaccagtggtactcccccatcactgatcaccacggccactacgatcacggccaccggctccaccaccaacccctcctcaactccagggacaacacctatccccccagtgctgaccaccaccgccaccacacctgcagccaccagcagcacagtgactccctcctctgccctagggaccacccacacacccccagtgccgaacaccacggccaccacacacgggcgatccctgtcccccagcagtccccacacggtgcgcacagcctggacttcggccacctcaggcaccttgggcaccacccacatcacagagccttccacggggacttcccacaccccagcagcaaccaccggtaccacccagcactcgactccagccctgtccagccctcaccctagcagcaggaccaccgagtcacccccttccccagggacgaccaccccgggccacaccacggccacctccaggaccacggccacggccacacccagcaagacccgcacctcgaccctgctgcccagcagccccacatcggcccccataaccacggtggtgaccacgggctgtgagccccagtgtgcctggtcagagtggctggactacagctaccccatgccggggccctctggcggggactttgacacctactccaacatccgtgcggccggaggggccgtctgtgagcagcccctgggcctcgagtgccgtgcccaggcccagcctggtgtccccctgggggagttgggccaggtcgtggaatgcagcctggactttggcctggtctgcaggaaccgtgagcaggtggggaagttcaagatgtgcttcaactatgaaatccgtgtgttctgctgcaactacggccactgccccagcaccccggccaccagctctacggccatgccctcctccactccggggacgacctggatcctcacagagctgaccacaacagccactacgactgcatccactggatccacggccaccccgtcctccaccccgggaacagctccccctcccaaagtgctgaccagcccggccaccacacccacagccaccagttccaaagccacttcctcctccagtccaaggactgcaaccacccttccagtgctgacaagcacagccaccaaatccacagctaccagcgttacacccatcccctcctccacccttgggaccaccgggaccctcccagaacagaccaccacacccgtggccaccatgtccacaatccacccctcctccactccggagaccacccacacctccacagtgctgaccacgaaggccaccacgacaagggccaccagttccacgtccaccccctcctccactccggggacgacctggatcctcacagagctgaccacagcagccactacaactgcagccactggccccacggccaccccgtcctccaccccagggaccacctggatcctcacagagctgaccacaacagccactacgactgcgtccactggatccacggccaccccgtcctccaccccagggaccacctggatcctcacagagccgagcactacagccaccgtgacggtgcccaccggatccacggccaccgcctcctccacccaggcaactgctggcaccccacatgtgagcaccacggccacgacacccacagtcaccagctccaaagccactccctcctccagtccagggactgcaactgcccttccagcactgagaagcacagccaccacacccacagctaccagctttacagccatcccctcctcctccctgggcaccacctggacccgcctatcacagaccaccacacccacggccaccatgtccacagccacaccctcctccactccagagactgtccacacctccacagtgcttaccgccacggccaccacaaccggggccaccggctctgtggccaccccctcctccaccccaggaacagctcacactaccaaagtgccgactaccacaaccacgggcttcacagccaccccctcctccagcccagggacggcactcacgcctccagtgtggatcagcacaaccaccacacccacaaccaccacacccacaaccagtggctccacggtgaccccctcctccatcccggggaccacccacaccgccagagtgctgaccaccaccaccacaactgtggccactggttctatggcaacaccctcctctagcacacagaccagtggtactcccccatcactgaccaccacggccactacgatcacggccaccggctccaccaccaacccctcctcaactccagggacaacacccatcaccccagtgctgaccagcacggccaccacacccgcagccaccagctccaaagccacttcctcctccagtccaaggactgcaaccacccttccagtgctgacaagcacagccacaaaatccacagctaccagctttacacccatcccctcctccaccctgtggaccacgtggaccgtcccagcacagaccaccacacccatgtccaccatgtccacaatccacacctcctctactccagagaccacccacacctccacagtgctgaccaccacagccaccatgacaagggccaccaattccacggccacaccctcctccactctggggacgacccggatcctcactgagctgaccacaacagccactacaactgcagccactggatccacggccaccctgtcctccaccccagggaccacctggatcctcacagagccgagcactatagccaccgtgatggtgcccaccggttccacggccaccgcctcctccactctgggaacagctcacacccccaaagtggtgaccaccatggccactatgcccacagccactgcctccacggttcccagctcgtccaccgtggggaccacccgcacccctgcagtgctccccagcagcctgccaaccttcagcgtgtccactgtgtcctcctcagtcctcaccaccctgagacccactggcttccccagctcccacttctctactccctgcttctgcagggcatttggacagtttttctcgcccggggaagtcatctacaataagaccgaccgagccggctgccatttctacgcagtgtgcaatcagcactgtgacattgaccgcttccagggcgcctgtcccacctccccaccgccagtgtcctccgccccgctgtcctcgccctcccctgcccctggctgtgacaatgccatccctctccggcaggtgaatgagacctggaccctggagaactgcacggtggccaggtgcgtgggtgacaaccgtgtcgtcctgctggacccaaagcctgtggccaacgtcacctgcgtgaacaagcacctgcccatcaaagtgtcggacccgagccagccctgtgacttccactatgagtgcgagtgcatctgcagcatgtggggcggctcccactattccacctttgacggcacctcttacaccttccggggcaactgcacctatgtcctcatgagagagatccatgcacgctttgggaatctcagcctctacctggacaaccactactgcacggcctctgccactgccgctgccgcccgctgcccccgcgccctcagcatccactacaagtccatggatatcgtcctcactgtcaccatggtgcatgggaaggaggagggcctgatcctgtttgaccaaattccggtgagcagcggtttcagcaagaacggcgtgcttgtgtctgtgctggggaccaccaccatgcgtgtggacattcctgccctgggcgtgagcgtcaccttcaatggccaagtcttccaggcccggctgccctacagcctcttccacaacaacaccgagggccagtgcggcacctgcaccaacaaccagagggacgactgtctccagcgggacggaaccactgccgccagttgcaaggacatggccaagacgtggctggtccccgacagcagaaaggatggctgctgggccccgactggcacaccccccactgccagccccgcagccccggtgtctagcacacccacccccaccccatgcccaccacagccgctctgtgatctgatgctgagccaggtctttgctgagtgccacaaccttgtgcccccgggcccattcttcaacgcctgcatcagcgaccactgcaggggccgccttgaggtgccctgccagagcctggaggcttacgcagagctctgccgcgcccggggagtgtgcagtgactggcgaggtgcaaccggtggcctgtgcgacctcacctgcccacccaccaaagtgtacaagccatgcggccccatacagcctgccacctgcaactctaggaaccagagcccacagctggaggggatggcggagggctgcttctgccctgaggaccagatcctcttcaacgcacacatgggcatctgcgtgcaggcctgcccctgcgtgggacccgatgggtttcctaaatttcccggggagcggtgggtcagcaactgccagtcctgcgtgtgtgacgagggttcagtgtcggtgcagtgcaagcccctgccctgtgacgcccagggtcagcccccgccgtgcaaccgtcccggcttcgtaaccgtgaccaggccccgggccgagaacccctgctgccccgagacggtgtgcgtgtgcaacacaaccacctgcccccagagcctgcctgtgtgcccgccagggcaggagtccatctgcacccaggaggagggcgactgctgtcccaccttccgctgcagacctcagctgtgttcgtacaatggcaccttctacggggttggtgcaaccttcccaggcgcccttccctgccacatgtgtacctgcctctctggggacacccaggacccaacggtgcaatgtcaggaggatgcctgcaacaatactacctgtccccagggctttgagtacaagagagtggccgggcagtgctgtggggagtgcgtccagaccgcctgcctcacgcccgatggccagccagtccagctgaatgaaacctgggtcaacagccatgtggacaactgcaccgtgtacctctgtgaggctgagggtggagtccatttgctgaccccacagcctgcatcctgcccagatgtgtccagctgcagggggagcctcaggaaaaccggctgctgctactcctgtgaggaggactcctgtcaagtccgcatcaacacgaccatcctgtggcaccagggctgcgagaccgaggtcaacatcaccttctgcgagggctcctgccccggagcgtccaagtactcagcagaggcccaggccatgcagcaccagtgcacctgctgccaggagaggcgggtccacgaggagacggtgcccttgcactgtcctaacggctcagccatcctgcacacctacacccacgtggatgagtgtggctgcacgcccttctgtgtccctgcgcccatggctcccccacacacccgtggcttcccggcccaggaggccactgctgtctgagaacgttctgcctccatccccatgctctgtccacctggagccaggatgtgcattgtctgatcatgaaaaccttgggcctcctctgcggagccccccggcctgtgtgtggcaccccgcgctccgtgctcctgctgcccaccccgtgggtgaaaccggccccagaagggtgaggggccagcaggacccctttcgggagggcgccactcaggagtcctaccctgggagagcctgtggcccaccttggccttgcccctccctgatgtcactgggacgccctggaacaaactaagcatgtgcgggcctatgtgtccctgccacggccggagcgcccgcgcagcacggattccagctggccacgtccggccgctggggcagacaggctggtccaggcaaggccagctgctgccaggaagctgcgacaggcaaggcggccgcctgtccatgcctgctgcagggtaactcagggctgaggtcgcaacggccaggtcagagaggggtcagcatcccaaagccccctctgctcaacccagcccagttttgcaaataaaccctgagcattgagta

What is claimed is:

1. A synthetic antisense oligonucleotide targeting MUC5B, wherein said oligonucleotide is fully chemically modified.

2. The oligonucleotide of claim 1, wherein the antisense oligonucleotide targets exons 4-8, 10, 11, 13, 16-22, 26, 28, 29, or 31 of MUC5B.

3. The oligonucleotide of claim 2, wherein the antisense oligonucleotide is complementary to:
a. one or more sequences in said exon;
b. one or more portions of an intron adjacent to said exon, wherein said intron is 1-60 or 25-35 nucleotides upstream or downstream of said exon; or
c. the intron-exon junction of said exon.

4. The oligonucleotide of claim 3, wherein the oligonucleotide targets a portion of any one or more of SEQ ID NOs: 233-250 or 274 or SEQ ID NOs: 2298-2305 or SEQ ID NOs: 261-270 or 273.

5. The oligonucleotide of claim 4, wherein the oligonucleotide targets a portion of exon 5, exon 22, exon 26, or exon 28.

6. The oligonucleotide of claim 5, wherein the oligonucleotide comprises SEQ ID NOs: 29-52 or 83-107.

7. The oligonucleotide of claim 6, wherein the oligonucleotide comprises SEQ ID NOs: 32, 30, 35, 88, 91, 94, 95, 101, 104, 105, or 107.

8. The oligonucleotide of claim 1, wherein said fully chemically modified oligonucleotide comprises a phosphate-ribose backbone, a phosphate-deoxyribose backbone, a phosphorothioate-deoxyribose backbone, a 2′-O-methyl-phosphorothioate backbone, a phosphorodiamidate morpholino backbone, a peptide nucleic acid backbone, a 2-methoxyethyl phosphorothioate backbone, a constrained ethyl backbone, an alternating locked nucleic acid backbone, a phosphorothioate backbone, N3′-P5′ phosphoroamidates, 2′-deoxy-2′-fluoro-β-d-arabino nucleic acid, cyclohexene nucleic acid backbone nucleic acid, tricyclo-DNA (tcDNA) nucleic acid backbone, ligand-conjugated antisense, 2′-O-methoxyethylribose (MOE), or a combination thereof.

9. The oligonucleotide of claim 1, wherein said oligonucleotide comprises 14-25 nucleotides, or 17-22 nucleotides.

10. A vector comprising one or more of the oligonucleotides of claim 1.

11. A cell comprising one or more of the oligonucleotides of claim 1.

12. A pharmaceutical composition comprising one or more of the oligonucleotides of claim 1.

13. The composition of claim 12, wherein said composition is formulated for intrapulmonary administration, inhalation or intranasal administration.

14. A method for treating, suppressing or inhibiting a lung disease or disorder in a subject, for reducing the levels of MUC5B or both MUC5AC and MUC5B in a cell of a subject having a lung disease, or inducing nonsense-mediated decay of MUC5B in a cell of a subject having a lung disease, comprising the step of administering to said subject the oligonucleotide of claim 1.

15. The method of claim 14, wherein said lung disease comprises cancer, a non-cancerous lung disease. a muco-obstructive disease, chronic obstructive pulmonary disease, asthma, Primary Ciliary Dyskinesia, Cystic Fibrosis, bronchiectasis, a pulmonary fibrotic disease, idiopathic pulmonary fibrosis (IPF), progressive pulmonary fibrosis (PPF), fibrotic hypersensitivity pneumonitis, interstitial lung disease, connective tissue disease-associated interstitial lung disease (CTD-ILD), rheumatoid arthritis (RA)-ILD, lung inflammation; or wherein said subject has hyperplasia of goblet cells; or any combination thereof.

16. The method of claim 14, wherein said subject has excess mucus secretion, hyperconcentrated mucus, failed mucus transport, mucus adhesion to airway surfaces, or levels of mucus secretion in the normal range.

17. The method of claim 14, wherein MUC5B mRNA or protein are over-expressed.

18. The method of claim 14, wherein MUC5B protein has normal or increased activation in the airway cells of said subject.

19. The method of claim 14, wherein the MUC5B gene in said subject comprise one or more homozygous or heterozygous mutations, polymorphisms, a single nucleotide polymorphism (SNP), or a combination thereof.

20. The method of claim 14, further comprising the step of administering one or more additional treatments to said subject, optionally selected from a corticosteroid, a short-acting bronchodilator, a long-acting bronchodilator, a combination of methylxanthines and corticosteroids, or any combination thereof.
